(19) United States
(12) Patent Application Publication
(10) Pub. No.: US 2026/0209772 A1
(43) Pub. Date: Jul. 23, 2026

(54) NOVEL RNA THERAPEUTICS AND USES THEREOF

(71) Applicant: Eli Lilly and Company, Indianapolis, IN (US)

(72) Inventors: Patrick Joseph ANTONELLIS, Norwell, MA (US); Thomas Patrick BEYER, Zionsville, IN (US); Jean Mawuena BRANTTIE, Indianapolis, IN (US); Christine Chih-Tao CHENG, Carmel, IN (US); Marjoke F. DEBETS, Carmel, IN (US); Konstantinos GAVARDINAS, Carmel, IN (US); Gregory Lawrence LACKNER, Indianapolis, IN (US); Jibo WANG, Carmel, IN (US); Takako WILSON, San Diego, CA (US)

(21) Appl. No.: 19/141,216

(22) PCT Filed: Dec. 22, 2023
(86) PCT No.: PCT/US2023/085630

§ 371 Date: Jun. 19, 2025

Related U.S. Application Data
(60) Provisional application No. 63/435,100, filed on Dec. 23, 2022.

(51) Int. Cl. C12N 15/113; A61K 31/712; A61K 31/7125; A61P 3/06; C12N 9/04

(52) U.S. Cl. CPC C12N 15/1137; A61K 31/712; A61K 31/7125; A61P 3/06; C12N 9/0006; C12Y 101/01034; C12N 2310/14; C12N 2310/315; C12N 2310/321; C12N 2310/322; C12N 2310/346; C12N 2310/351; C12N 2310/3521; C12N 2310/3533

(57) ABSTRACT

The present disclosure relates to novel therapeutic compounds, known as RNAi agents, that decrease expression of the HMGCR receptor (expressed by the HMGCR gene), thereby decreasing expression of mRNA and protein expression. Such RNAi agents are useful in the treatment of diseases and disorders involving the regulation of HMGCR expression and function, such as diseases and disorders that are risk factors for ASCVD (such as, dyslipidemia, such as hypercholesteremia).

### BACKGROUND

[0001] The present invention relates to novel therapeutic compounds, known as RNAi agents, that decrease expression of the HMGCR (expressed by the HMGCR gene), thereby decreasing expression of HMGCR mRNA and HMGCR protein. Such RNAi agents are useful in the treatment of diseases or disorders involving the regulation of HMGCR expression and function (e.g., diseases or disorders know as risk factors for atherosclerotic cardiovascular disease (ASCVD) such as dyslipidemia).

[0002] HMGCR, 3-hydroxy-3-methylglutaryl-CoA reductase or HMGCo reductase, is the rate-limiting enzyme for the synthesis of cholesterol, which plays an important role in cell building and hormone production. HMGCR catalysis produces mevalonate, a precursor for cholesterol biosynthesis. Non-sterol and sterols derived from mevalonate regulate HMGCR via a negative feedback mechanism. In mammalian cells, HMGCR is normally suppressed by cholesterol derived from the internalization and degradation of low-density lipoprotein (LDL) via the LDL receptor.

[0003] Plasma cholesterol can become elevated because of genetics but is more often the result of poor diet that is high in fats and/or sugars and a sedentary lifestyle. Cholesterol can deposit in arteries and is an important determinant of atherosclerosis and ischemia. Competitive inhibitors of HMGCR induce the expression of LDL receptors in the liver, which in turn increases the catabolism of plasma LDL and lowers the plasma concentration of cholesterol. However, statins have multiple side effects, including insufficient lowering of cholesterol and/or LDL. Accordingly, more treatments are needed to lower cholesterol and to treat disease or disorders known as risk factors for (ASCVD) (e.g., dyslipidemia).

### SUMMARY OF INVENTION

[0004] In one aspect, the present disclosure describes RNAi agents for reducing HMGCR gene expression, wherein the RNAi agent comprises a delivery moiety of Formula I conjugated to R, wherein R is a double stranded RNA (dsRNA) comprising an antisense strand and a sense strand:

[chemical structure]

[0005] wherein R is conjugated to connection point E of Formula I, optionally via a linker, wherein the sense strand and the antisense strand form a duplex region, and wherein the antisense strand comprises a region of complementarity to a HMGCR mRNA target sequence of SEQ ID NO: 1, and wherein the sense and antisense strand each optionally comprise one or more modified nucleotides and one or more modified internucleotide linkages. In some embodiments, Formula I is conjugated to the sense strand, optionally via a linker. In some embodiments, Formula I is conjugated to the 3′ terminal nucleotide of the sense strand, optionally via a linker.

[0006] In some embodiments, the antisense strand is 15 to 50 nucleotides in length. In some embodiments, the sense strand is 15 to 50 nucleotides in length. In some embodiments, the antisense strand is between 18 and 23 nucleotides in length. In some embodiments, the sense strand is between 18 and 21 nucleotides in length. In some embodiments, the antisense strand is 23 nucleotides in length and the sense strand is 21 nucleotides in length.

[0007] In some embodiments, the sense strand or the antisense strand comprises a sequence selected from Table 2, 3, 4A, and 4B, as disclosed herein. In some embodiments, the sense strand and the antisense strand comprises a sequence selected from Table 2, 3, 4A, and 4B, as disclosed herein.

[0008] In some embodiments, R is conjugated to Formula I via a linker. In some embodiments, the linker comprises a linker of Formula II having connection points A and B or the linker comprises Formula III having connection points C and D, and wherein:

[chemical structure]

[0009] a. Formula I at connection point E is conjugated to Formula II at connection point A and Formula II is conjugated to a phosphate group or a phosphorothioate group at connection point B, and the phosphate group or phosphorothioate group is conjugated to R; or
[0010] b. Formula I at connection point E is conjugated to Formula III at connection point C and Formula III is conjugated to a phosphate group or phosphorothioate group at connection point D, and the phosphate group or phosphorothioate group is further conjugated to R.

[0011] In another aspect, the present disclosure provides pharmaceutical compositions comprising the RNAi agent described herein and one or more pharmaceutically acceptable excipients.

[0012] In another aspect, the present disclosure provides methods of treating a disease or disorder associated with ASCVD. In some embodiments, the disease or disorder is dyslipidemia, primary dysbetalipoproteinemia, hypertriglyceridemia, or atherosclerosis. In some embodiments, the present disclosure provides a method of treating dyslipidemia, comprising administering to a patient an RNAi agent or a pharmaceutical composition thereof as described herein.

[0013] In another aspect, the present disclosure provides an RNAi agent for the use in a therapy. In some embodiments, the present disclosure provides an RNAi agent for use in treating a disease or disorder associated with ASCVD. In some embodiments, the present disclosure provides an RNAi agent for use in treating a disease or disorder wherein the disease or disorder is dyslipidemia, primary dysbetalipoproteinemia, hypertriglyceridemia, or atherosclerosis.

[0014] In another aspect, the present disclosure provides the use of an RNAi agent for the manufacture of a medicament for use in a therapy. In some embodiments, the present disclosure provides an RNAi agent for the manufacture of a medicament for use in treating a disease or disorder associated with ASCVD. In some embodiments, the present disclosure provides an RNAi agent for the manufacture of a medicament for use in treating a disease or disorder, wherein the disease or disorder is dyslipidemia, primary dysbetalipoproteinemia, hypertriglyceridemia, or atherosclerosis.

### DETAILED DESCRIPTION

[0015] HMGCR siRNAs and ASOs have been described, but none have progressed for treatment in patients. Using the HMGCR RNAi agents herein to decrease expression of HMGCR can be employed to treat disease or disorders associated with ASCVD (e.g., dyslipidemia, primary dysbetalipoproteinemia, hypertriglyceridemia, or atherosclerosis). Such siRNAs may exhibit one or more of, e.g., as compared to other liver targeted siRNAs such as HMGCR siRNAs comprising a different delivery ligand, a different sequence, a differently modified sequence, or as compared to treatment with a vehicle control: improved knockdown in the liver; improved tissue exposure, improved exposure in liver hepatocytes; an improved durable response; an improved pharmacokinetic profile; fewer off target effects; and/or an improved toxicity profile. Other embodiments of the HMGCR RNAi agents herein may include one or more of fewer side effects as compared to statins or other standard of care; an improved toxicity profile; an improved safety profile; improved tolerability or compliance; and/or improved liver function tests. Still other siRNAs herein may have other benefits, e.g., in combination with any of the preceding or as a stand-alone benefit, including improved and/or simplified synthesis, synthetic processes with fewer degradation products; or any combination thereof.

[0016] The RNAi agents herein comprise a sense strand and an antisense strand, wherein each is an oligonucleotide. In some embodiments, the RNAi agents described herein also comprise a delivery moiety. As used herein, “nucleotide” means an organic compound having a nucleoside (a nucleobase such as, for example, adenine, cytosine, guanine, thymine, or uracil; and a pentose sugar such as, for example, ribose or 2′-deoxyribose) and a phosphate group. A “nucleotide” can serve as a monomeric unit of nucleic acid polymers such as deoxyribonucleic acid (DNA) and ribonucleic acid (RNA).

[0017] As used herein, “oligonucleotide” means a short nucleic acid compound (e.g., less than about 100 nucleotides in length). An oligonucleotide may be single-stranded (ss) or double stranded (ds). An oligonucleotide may or may not have duplex regions. As a set of non-limiting examples, an oligonucleotide may be, but is not limited to, a small interfering RNA (siRNA), microRNA (miRNA), short hairpin RNA (shRNA), Dicer substrate interfering RNA (DsiRNA), or antisense oligonucleotide (ASO).

[0018] As used herein, “ribonucleotide” means a nucleotide having a ribose as its pentose sugar, which contains a hydroxyl group at its 2′ position. A modified ribonucleotide is a ribonucleotide having one or more modifications or substitutions of atoms other than hydrogen at the 2′ position, including modifications or substitutions in or of the nucleobase, sugar, or phosphate group.

[0019] As used herein, “modified internucleotide linkage” means an internucleotide linkage having one or more chemical modifications when compared with a reference internucleotide linkage having a phosphodiester bond. A modified internucleotide linkage can be a non-naturally occurring linkage.

[0020] As used herein, “modified nucleotide” refers to a nucleotide having one or more chemical modifications when compared with a corresponding reference nucleotide selected from: adenine ribonucleotide, guanine ribonucleotide, cytosine ribonucleotide, uracil ribonucleotide, adenine deoxyribonucleotide, guanine deoxyribonucleotide, cytosine deoxyribonucleotide, and thymidine deoxyribonucleotide. A modified nucleotide can be a non-naturally occurring nucleotide. A modified nucleotide can have, for example, one or more chemical modification in its sugar, nucleobase, and/or phosphate group. Additionally, or alternatively, a modified nucleotide can have one or more chemical moieties conjugated to a corresponding reference nucleotide.

[0021] The term “percentage sequence identity” with respect to a reference nucleic acid sequence is defined as the percentage of nucleotides, nucleosides, or nucleobases in a candidate sequence that are identical with the nucleotides, nucleosides, or nucleobases in the reference nucleic acid sequence, after optimally aligning the sequences and introducing gaps or overhangs, if necessary, to achieve the maximum percent sequence identity. Alignment for purposes of determining percent nucleic acid sequence identity can be achieved in various ways that are within the skill in the art, for instance, using publicly available computer software programs, for example, those described in Current Protocols in Molecular Biology (Ausubel et al., eds., 1987, Supp. 30, section 7.7.18, Table 7.7.1), and including BLAST, BLAST-2, ALIGN, Clustal W2.0 or Clustal X2.0 or Megalign (DNASTAR) software. In one embodiment herein, sequence identity is calculated use Clustal W2.0 or Clustal X2.0. In another embodiment, sequence identity is calculated using Clustal W2.0. In another embodiment, sequence identity is calculated using Clustal X2.0. Those skilled in the art can determine appropriate parameters for measuring alignment, including any algorithms needed to achieve maximal alignment over the full length of the sequences being compared. Percentage of “sequence identity” can be determined by comparing two optimally aligned sequences over a comparison window, where the fragment of the nucleic acid sequence in the comparison window may comprise additions or deletions (e.g., gaps or overhangs) as compared to the reference sequence (which does not comprise additions or deletions) for optimal alignment of the two sequences. The percentage can be calculated by determining the number of positions at which the identical nucleotide, nucleoside, or nucleobase occurs in both sequences to yield the number of matched positions, dividing the number of matched positions by the total number of positions in the window of comparison, and multiplying the result by 100 to yield the percentage of sequence identity. The output is the percent identity of the subject sequence with respect to the query sequence. In some embodiments, percent sequence identity is the percent of nucleotide residues that are identical between two strands using the PID3 calculation, which is the number of identical nucleotide residues divided by the total number of nucleotides of the shortest of the two sequences, multiplied by 100. See, e.g., Raghava, G., Barton, G. J. Quantification of the variation in percentage identity for protein sequence alignments. BMC Bioinformatics 7, 415 (2006).

[0022] As used herein, “phosphate analog” means a chemical moiety that mimics the electrostatic and/or steric properties of a phosphate group. In some embodiments, a phosphate analog is positioned at the 5′ terminal nucleotide of an oligonucleotide in place of a 5′-phosphate. A 5′ phosphate analog can include a phosphatase-resistant linkage. Examples of phosphate analogs include, but are not limited to, 5′ phosphonates, such as 5′ methylene phosphonate (5′-MP) and 5′-(E)-vinylphosphonate (5′-VP). An oligonucleotide can have a phosphate analog at a 4′-carbon position of the sugar (referred to as a “4′-phosphate analog”) at a 5′-terminal nucleotide. An example of a 4′-phosphate analog is oxymethylphosphonate, in which the oxygen atom of the oxymethyl group is bound to the sugar moiety (e.g., at its 4′-carbon) or analog thereof. See, e g., Intl. Patent Application Publication No. WO 2018/045317. Other modifications have been developed for the 5′ end of oligonucleotides (see, e.g., Intl. Patent Application No. WO 2011/133871; U.S. Pat. No. 8,927,513; and Prakash et al. (2015) Nuc. Acids Res. 43:2993-3011).

[0023] As used herein, “region of complementarity” means a nucleotide sequence of a nucleic acid (e.g., a double stranded oligonucleotide) that is sufficiently complementary to an antiparallel nucleotide sequence to permit hybridization between the two sequences of nucleotides under appropriate hybridization conditions (e.g., in a phosphate buffer, in a cell, etc.). In some embodiments, an oligonucleotide herein includes a targeting sequence having a region of complementary to a mRNA target sequence.

[0024] As used herein, “duplex,” in reference to nucleic acids or oligonucleotides, such as a sense strand or an antisense strand means a structure formed through hydrogen bonds of complementary base pairing of two antiparallel sequences of nucleotides under suitable conditions to promote such a structure. A duplex may form despite not having full complementarity between the two strands, or when an abasic nucleotide is present.

[0025] RNA interference is a specialized cellular process that utilizes RISC for degrading RNA in a sequence dependent manner. As used herein, “RNAi agent” means an agent comprising either (a) a double stranded oligonucleotide having a sense strand (passenger) and antisense strand (guide), in which the antisense strand or part of the antisense strand is used by the Argonaute 2 (Ago2) endonuclease in the cleavage of a target mRNA or (b) a single stranded oligonucleotide having a single antisense strand, where that antisense strand (or part of that antisense strand) is used by the Ago2 endonuclease in the cleavage of a target mRNA. In some embodiments, the RNAi agent described herein also comprises a delivery moiety.

[0026] As used herein, a bond illustrated as

[chemical structure]

indicates a connection point as described therein. For example, if a generic variable, e.g., X, is stated to be attached at the connection point E as shown below, this is intended to show X is bonded to the atom of the connection point (see the scheme below).

[chemical structure]

[0027] As used herein, an “effective amount” refers to an amount necessary (for periods of time and for the means of administration) to achieve the desired therapeutic result. An effective amount of a RNAi agent may vary according to factors such as the disease state, age, sex, and weight of the individual, and the ability of the RNAi agent to elicit a desired response in the individual. An effective amount is also one in which any toxic or detrimental effects of the RNAi agent are outweighed by the therapeutically beneficial effects.

[0028] As used herein, “treatment” or “treating” refers to all processes wherein there may be a slowing, controlling, delaying, or stopping of the progression of the disorders or disease disclosed herein, or ameliorating disorder or disease symptoms, and need not indicate a total elimination of all disorder or disease symptoms. Treatment includes administration of an RNAi agent or pharmaceutical composition thereof for treatment of a disease or condition in a mammal including a human.

[0029] As used herein, the term “disease or disorder associated with ASCVD” refers to any disease or disorder that is a risk factor for ASCVD.

[0030] Provided herein are RNAi agents for reducing HMGCR gene expression, wherein the RNAi agent comprises a delivery moiety of Formula I conjugated to R, wherein R is a double stranded RNA (dsRNA) comprising an antisense strand and a sense strand:

[chemical structure]

wherein R is conjugated to connection point E of Formula I, optionally via a linker, wherein the sense strand and the antisense strand form a duplex region, and wherein the antisense strand comprises a region of complementarity to a HMGCR mRNA target sequence of SEQ ID NO: 1, and wherein the sense and antisense strand each optionally comprise one or more modified nucleotides and one or more modified internucleotide linkages.

[0031] Also provided here are RNAi agents for reducing HMGCR gene expression, wherein the RNAi agent comprises a delivery moiety of Formula Ia conjugated to R, wherein R comprises an antisense strand and a sense strand:

[chemical structure]

[0032] wherein R is conjugated to Formula Ia via a linker, wherein the sense strand and the antisense strand form a duplex region, and wherein the antisense strand comprises a region of complementarity to a HMGCR mRNA target sequence of SEQ ID NO: 1, and wherein the sense and antisense strand each optionally comprise one or more modified nucleotides and one or more modified internucleotide linkages.

[0033] Disclosed herein are RNAi agents for reducing HMGCR gene expression, wherein the RNAi agents comprise a sense strand and an antisense strand, wherein the sense strand and the antisense strand form a duplex region, and wherein the antisense strand comprises a region of complementarity of at least 15 nucleotides to the sequence as set forth in SEQ ID NO: 1, and wherein the sense strand and/or the antisense strand each optionally comprise one or more modified nucleotides and/or modified internucleotide linkages. In further embodiments, the antisense strand comprises at least 15 nucleotides of a sequence in Table 2. In further embodiments, the antisense strand comprises at least 18 nucleotides of a sequence in Table 2. In further embodiments, the RNAi agent reduces expression of the HMGCR gene in a liver cell, as compared to a control. In further embodiments, the RNAi agent reduces HMGCR gene expression by about 50% or greater in a cell expressing HMGCR, as compared to a control. In further embodiments, the RNAi agent reduces HMGCR gene expression by reducing the level of HMGCR mRNA transcript, the level of HMGCR protein, or both.

[0034] In further embodiments, the antisense strand is 15 to 50 nucleotides in length, and/or the sense strand is 15 to 50 nucleotides in length. In further embodiments, the sense and/or sense strand is independently 15 to 30 nucleotides in length. In further embodiments, the antisense strand is between 18 and 23 nucleotides in length. In further embodiments, the sense strand is between 18 and 21 nucleotides in length.

[0035] In further embodiments, the RNAi agent comprises an antisense strand that comprises at least 15 contiguous nucleotides of a sequence selected from the group consisting of SEQ ID NOs: 2 to 387. In still further embodiments, the antisense strand comprises at least 18 contiguous nucleotides of a sequence selected from the group consisting of SEQ ID NOs: 2 to 387.

[0036] In other further embodiments, the antisense strand comprises at least 18 contiguous nucleotides of a sequence selected from the group consisting of 18 contiguous nucleotides of a sequence selected from the group consisting of SEQ ID NOs:2 to 387.

[0037] In further embodiments, the antisense strand of the RNAi agent is 23 nucleotides in length. In still further embodiments, the sense strand is 21 nucleotides in length. In another embodiment, the antisense strand comprises a sequence selected from the group consisting of 774 to 1159, or a sequence having at least 90% sequence identity thereto. In another embodiment, the sense and antisense strand comprise a sequence selected from the sequences set forth in Table 3.

[0038] The sense strand and the antisense strand of the RNAi agents disclosed herein do not require full complementarity. Accordingly, in the RNAi agents disclosed herein, the duplex region between the sense strand and the antisense strand comprises 0, 1, 2, or 3 mismatches between the sense strand and the antisense strand. In further embodiments, the duplex region between the sense strand and the antisense strand consists of 0, 1, 2, or 3 mismatches between the sense strand and the antisense strand.

[0039] In further embodiments, the sense strand comprises a sequence selected from the group consisting of SEQ ID NO: 388 to 773.

[0040] In further embodiments, the sense strand and the antisense strand each independently comprise one or more modified nucleotides, such as 2′ fluoro modified nucleotides or 2′-O-methyl modified nucleotides. In still further embodiments of the RNAi agents disclosed herein, each nucleotide of the sense strand and each nucleotide of the antisense strand is a modified nucleotide. In further embodiments, each nucleotide is a 2′ fluoro modified nucleotide or a 2′-O-methyl modified nucleotide.

[0041] In further embodiments of the RNAi agents disclosed herein, the antisense strand is 23 nucleotides in length, each nucleotide of the antisense strand is a modified nucleotide, and 2′ fluoro modified nucleotides are present at
[0042] a. Positions 2, 3, 7, 14, and 16 from the 5′ end of the antisense strand; or
[0043] b. Positions 2, 5, 7, 14, and 16 from the 5′ end of the antisense strand; or
[0044] c. Positions 2, 3, 8, 14, and 16 from the 5′ end of the antisense strand; or
[0045] d. Positions 2, 5, 8, 14, and 16 from the 5′ end of the antisense strand; or
[0046] e. Positions 2, 6, 14, and 16 from the 5′ end of the antisense strand.
[0047] In further embodiments, the nucleotides that are not 2′ fluoro modified nucleotides are 2′-O-methyl modified nucleotides.

[0048] In further embodiments of the RNAi agents disclosed herein, the sense strand and antisense strand each independently comprise one or more modified internucleotide linkages, and each modified internucleotide linkage is a phosphorothioate linkage. In further embodiments, the sense strand and antisense strand each independently comprise four phosphorothioate linkages. In still further embodiments, the two terminal nucleotides at each of the 5′ and 3′ ends of each of the sense and antisense strand are phosphorothioate linkages.

[0049] In other embodiments, the 5′ nucleotide of the antisense strand comprises a phosphate group or a phosphate analog. As used herein, “phosphate analog” means a chemical moiety that mimics the electrostatic and/or steric properties of a phosphate group. In some embodiments, a phosphate analog is positioned at the 5′ terminal nucleotide of an oligonucleotide in place of a 5′-phosphate. A 5′ phosphate analog can include a phosphatase-resistant linkage. Examples of phosphate analogs include, but are not limited to, 5′ phosphonates, such as 5′ methylene phosphonate (5′-MP) and 5′-(E)-vinylphosphonate (5′-VP). An oligonucleotide can have a phosphate analog at a 4′-carbon position of the sugar (referred to as a “4′-phosphate analog”) at a 5′-terminal nucleotide. An example of a 4′-phosphate analog is oxymethylphosphonate, in which the oxygen atom of the oxymethyl group is bound to the sugar moiety (e.g., at its 4′-carbon) or analog thereof. See, e g., Intl. Patent Application Publication No. WO 2018/045317. Other modifications have been developed for the 5′ end of oligonucleotides (see, e.g., Intl. Patent Application No. WO 2011/133871; U.S. Pat. No. 8,927,513; and Prakash et al. (2015) Nuc. Acids Res. 43:2993-3011).

[0050] In further embodiments of the RNAi agents disclosed herein, the antisense strand comprises a sequence selected from the group consisting of SEQ ID NOs: 1161, 1163, 1165, 1167, 1169, 1171, 1173, 1175, 1177, 1179, 1181, 1183, 1185, 1187, 1189, 1191, 1193, 1195, 1197, 1199, 1201, 1203, 1205, 1207, 1209, 1211, 1213, 1215, 1217, 1219, 1221, 1223, 1225, 1227, 1229, 1231, 1233, 1235, 1237, 1239, 1241, 1243, 1245, 1247, 1249, 1251, 1253, 1255, 1257, 1259, 1261, 1263, 1265, 1267, 1269, 1271, 1273, 1275, 1277, 1279, 1281, 1283, 1285, 1287, 1289, 1291, 1293, 1295, 1297, 1299, 1301, 1303, 1305, 1307, 1309, 1311, 1313, 1315, 1317, 1319, 1321, 1323, 1325, 1327, 1329, 1331, 1333, 1335, 1337, 1339, 1341, 1343, 1345, 1347, 1349, 1351, 1353, 1355, 1357, 1359, 1361, 1363, 1365, 1367, 1369, 1371, 1373, 1375, 1377, 1379, 1381, 1383, 1385, 1387, 1389, 1391, 1393, 1395, 1397, 1399, 1401, 1403, 1405, 1407, 1409, 1411, 1413, 1415, 1417, 1419, 1421, 1423, 1425, 1427, 1429, 1431, 1433, 1435, 1437, 1439, 1441, 1443, 1445, 1447, 1449, 1451, 1453, 1455, 1457, 1459, 1461, 1463, 1465, 1467, 1469, 1471, 1473, 1475, 1477, 1479, 1481, 1483, 1485, 1487, 1489, 1491, 1493, 1495, 1497, 1499, 1501, 1503, 1505, 1507, 1509, 1511, 1513, 1515, 1517, 1519, 1521, 1523, 1525, 1527, 1529, 1531, 1533, 1535, 1537, 1539, 1541, 1543, 1545, 1547, 1549, 1551, 1553, 1555, 1557, 1559, 1561, 1563, 1565, 1567, 1569, 1571, 1573, 1575, 1577, 1579, 1581, 1583, 1585, 1587, 1589, 1591, 1593, 1595, 1597, 1599, 1601, 1603, 1605, 1607, 1609, 1611, 1613, 1615, 1617, 1619, 1621, 1623, 1625, 1627, 1629, 1631, 1633, 1635, 1637, 1639, 1641, 1643, 1645, 1647, 1649, 1651, 1653, 1655, 1657, 1659, 1661, 1663, 1665, 1667, 1669, 1671, 1673, 1675, 1677, 1679, 1681, 1683, 1685, 1687, 1689, 1691, 1693, 1695, 1697, 1699, 1701, 1703, 1705, 1707, 1709, 1711, 1713, 1715, 1717, 1719, 1721, 1723, 1725, 1727, 1729, 1731, 1733, 1735, 1737, 1739, 1741, 1743, 1745, 1747, 1749, 1751, 1753, 1755, 1757, 1759, 1761, 1763, 1765, 1767, 1769, 1771, 1773, 1775, 1777, 1779, 1781, 1783, 1785, 1787, 1789, 1791, 1793, 1795, 1797, 1799, 1801, 1803, 1805, 1807, 1809, 1811, 1813, 1815, 1817, 1819, 1821, 1823, 1825, 1827, 1829, 1831, 1833, 1835, 1837, 1839, 1841, 1843, 1845, 1847, 1849, 1851, 1853, 1855, 1857, 1859, 1861, 1863, 1865, 1867, 1869, 1871, 1873, 1875, 1877, 1879, 1881, 1883, 1885, 1887, 1889, 1891, 1893, 1895, 1897, 1899, 1901, 1903, 1905, 1907, 1909, 1911, 1913, 1915, 1917, 1919, 1921, 1923, 1925, 1927, 1929, 1931, or a sequence having at least 90% sequence identity thereto, wherein the 5′ terminal nucleotide of the antisense strand comprises a 5′ a vinyl phosphonate, a phosphate, or a hydroxyl group. In other embodiments, the phosphate group listed at the 5′ end of the recited SEQ ID NO: is removed and replaced with an OH. In other embodiments, the phosphate group listed at the 5′ end of the recited SEQ ID NO: is replaced with a 5′ vinylphosphonate.

[0051] In further embodiments of the RNAi agents disclosed herein, the antisense strand comprises a sequence selected from the group consisting of SEQ ID Nos: 1932-2317 or a sequence having at least 90% sequence identity thereto.

[0052] In further embodiments of the RNAi agents disclosed herein, the antisense strand comprises a sequence selected from the group consisting of SEQ ID Nos: 1932-2317 or a sequence having at least 95% sequence identity thereto.

[0053] In further embodiments the sense strand comprises a sequence selected from the group consisting of SEQ ID NOs: 1160, 1162, 1164, 1166, 1168, 1170, 1172, 1174, 1176, 1178, 1180, 1182, 1184, 1186, 1188, 1190, 1192, 1194, 1196, 1198, 1200, 1202, 1204, 1206, 1208, 1210, 1212, 1214, 1216, 1218, 1220, 1222, 1224, 1226, 1228, 1230, 1232, 1234, 1236, 1238, 1240, 1242, 1244, 1246, 1248, 1250, 1252, 1254, 1256, 1258, 1260, 1262, 1264, 1266, 1268, 1270, 1272, 1274, 1276, 1278, 1280, 1282, 1284, 1286, 1288, 1290, 1292, 1294, 1296, 1298, 1300, 1302, 1304, 1306, 1308, 1310, 1312, 1314, 1316, 1318, 1320, 1322, 1324, 1326, 1328, 1330, 1332, 1334, 1336, 1338, 1340, 1342, 1344, 1346, 1348, 1350, 1352, 1354, 1356, 1358, 1360, 1362, 1364, 1366, 1368, 1370, 1372, 1374, 1376, 1378, 1380, 1382, 1384, 1386, 1388, 1390, 1392, 1394, 1396, 1398, 1400, 1402, 1404, 1406, 1408, 1410, 1412, 1414, 1416, 1418, 1420, 1422, 1424, 1426, 1428, 1430, 1432, 1434, 1436, 1438, 1440, 1442, 1444, 1446, 1448, 1450, 1452, 1454, 1456, 1458, 1460, 1462, 1464, 1466, 1468, 1470, 1472, 1474, 1476, 1478, 1480, 1482, 1484, 1486, 1488, 1490, 1492, 1494, 1496, 1498, 1500, 1502, 1504, 1506, 1508, 1510, 1512, 1514, 1516, 1518, 1520, 1522, 1524, 1526, 1528, 1530, 1532, 1534, 1536, 1538, 1540, 1542, 1544, 1546, 1548, 1550, 1552, 1554, 1556, 1558, 1560, 1562, 1564, 1566, 1568, 1570, 1572, 1574, 1576, 1578, 1580, 1582, 1584, 1586, 1588, 1590, 1592, 1594, 1596, 1598, 1600, 1602, 1604, 1606, 1608, 1610, 1612, 1614, 1616, 1618, 1620, 1622, 1624, 1626, 1628, 1630, 1632, 1634, 1636, 1638, 1640, 1642, 1644, 1646, 1648, 1650, 1652, 1654, 1656, 1658, 1660, 1662, 1664, 1666, 1668, 1670, 1672, 1674, 1676, 1678, 1680, 1682, 1684, 1686, 1688, 1690, 1692, 1694, 1696, 1698, 1700, 1702, 1704, 1706, 1708, 1710, 1712, 1714, 1716, 1718, 1720, 1722, 1724, 1726, 1728, 1730, 1732, 1734, 1736, 1738, 1740, 1742, 1744, 1746, 1748, 1750, 1752, 1754, 1756, 1758, 1760, 1762, 1764, 1766, 1768, 1770, 1772, 1774, 1776, 1778, 1780, 1782, 1784, 1786, 1788, 1790, 1792, 1794, 1796, 1798, 1800, 1802, 1804, 1806, 1808, 1810, 1812, 1814, 1816, 1818, 1820, 1822, 1824, 1826, 1828, 1830, 1832, 1834, 1836, 1838, 1840, 1842, 1844, 1846, 1848, 1850, 1852, 1854, 1856, 1858, 1860, 1862, 1864, 1866, 1868, 1870, 1872, 1874, 1876, 1878, 1880, 1882, 1884, 1886, 1888, 1890, 1892, 1894, 1896, 1898, 1900, 1902, 1904, 1906, 1908, 1910, 1912, 1914, 1916, 1918, 1920, 1922, 1924, 1926, 1928, 1930, or a sequence having at least 90% sequence identity thereto.

[0054] In still further embodiments of the RNAi agents disclosed herein, the sense strand and antisense strand are a pair of oligonucleotide sequences selected from Table 4A, 4B, or a sequence that is at least 80, 81, 82, 83, 84, 85, 86, 87, 88, 89, 90, 91, 92, 93, 94, 95, 96, 97, 98, or 99 percent identical to the sequence in Table 4A or 4B. In further embodiments, 1, 2, or 3 mismatches are introduced into the sense strand of the pair in Table 4A or 4B. In further embodiments, 1, 2, or both terminal nucleotides of 5′ end of the antisense strand are changed.

[0055] In some embodiments of the RNAi agents herein, the antisense strand comprises a first nucleic acid sequence that has at least 90% sequence identity to an antisense sequence corresponding to a Duplex NO: in Table 4A or 4B, and the sense strand comprises a second nucleic acid sequence that has at least 90% sequence identity to a sense sequence corresponding to the same Duplex No: in Table 4A or 4B. For example, in one embodiment, the antisense strand comprises a first nucleic acid sequence that has at least 90% sequence identity to an antisense sequence corresponding to a Duplex NO: 387 in Table 4A, that is, a first nucleic acid sequence that has at least 90% sequence identity to SEQ ID NO: 1161, and the sense strand comprises a second nucleic acid sequence that has at least 90% sequence identity to a sense sequence corresponding to Duplex No: 387 in Table 4A, that is, SEQ ID NO: 1160. In further embodiments, the 5′ phosphate of the antisense strand is further modified/replaced, and is a 5′ vinylphophonate or an OH group.

[0056] A duplex, (e.g., a “Duplex No.:”), as shown herein, (see, e.g., Tables 4A and 4B), corresponds to a specific sense and antisense strand.

[0057] In further embodiments, the 5′ terminal nucleotide of the antisense strand is substituted such that the final sequence contains a vinylphosphonate, a phosphate group, or an OH group. For example, for antisense sequences of SEQ ID NOs 1161, 1163, 1165, 1167, 1169, 1171, 1173, 1175, 1177, 1179, 1181, 1183, 1185, 1187, 1189, 1191, 1193, 1195, 1197, 1199, 1201, 1203, 1205, 1207, 1209, 1211, 1213, 1215, 1217, 1219, 1221, 1223, 1225, 1227, 1229, 1231, 1233, 1235, 1237, 1239, 1241, 1243, 1245, 1247, 1249, 1251, 1253, 1255, 1257, 1259, 1261, 1263, 1265, 1267, 1269, 1271, 1273, 1275, 1277, 1279, 1281, 1283, 1285, 1287, 1289, 1291, 1293, 1295, 1297, 1299, 1301, 1303, 1305, 1307, 1309, 1311, 1313, 1315, 1317, 1319, 1321, 1323, 1325, 1327, 1329, 1331, 1333, 1335, 1337, 1339, 1341, 1343, 1345, 1347, 1349, 1351, 1353, 1355, 1357, 1359, 1361, 1363, 1365, 1367, 1369, 1371, 1373, 1375, 1377, 1379, 1381, 1383, 1385, 1387, 1389, 1391, 1393, 1395, 1397, 1399, 1401, 1403, 1405, 1407, 1409, 1411, 1413, 1415, 1417, 1419, 1421, 1423, 1425, 1427, 1429, 1431, 1433, 1435, 1437, 1439, 1441, 1443, 1445, 1447, 1449, 1451, 1453, 1455, 1457, 1459, 1461, 1463, 1465, 1467, 1469, 1471, 1473, 1475, 1477, 1479, 1481, 1483, 1485, 1487, 1489, 1491, 1493, 1495, 1497, 1499, 1501, 1503, 1505, 1507, 1509, 1511, 1513, 1515, 1517, 1519, 1521, 1523, 1525, 1527, 1529, 1531, 1533, 1535, 1537, 1539, 1541, 1543, 1545, 1547, 1549, 1551, 1553, 1555, 1557, 1559, 1561, 1563, 1565, 1567, 1569, 1571, 1573, 1575, 1577, 1579, 1581, 1583, 1585, 1587, 1589, 1591, 1593, 1595, 1597, 1599, 1601, 1603, 1605, 1607, 1609, 1611, 1613, 1615, 1617, 1619, 1621, 1623, 1625, 1627, 1629, 1631, 1633, 1635, 1637, 1639, 1641, 1643, 1645, 1647, 1649, 1651, 1653, 1655, 1657, 1659, 1661, 1663, 1665, 1667, 1669, 1671, 1673, 1675, 1677, 1679, 1681, 1683, 1685, 1687, 1689, 1691, 1693, 1695, 1697, 1699, 1701, 1703, 1705, 1707, 1709, 1711, 1713, 1715, 1717, 1719, 1721, 1723, 1725, 1727, 1729, 1731, 1733, 1735, 1737, 1739, 1741, 1743, 1745, 1747, 1749, 1751, 1753, 1755, 1757, 1759, 1761, 1763, 1765, 1767, 1769, 1771, 1773, 1775, 1777, 1779, 1781, 1783, 1785, 1787, 1789, 1791, 1793, 1795, 1797, 1799, 1801, 1803, 1805, 1807, 1809, 1811, 1813, 1815, 1817, 1819, 1821, 1823, 1825, 1827, 1829, 1831, 1833, 1835, 1837, 1839, 1841, 1843, 1845, 1847, 1849, 1851, 1853, 1855, 1857, 1859, 1861, 1863, 1865, 1867, 1869, 1871, 1873, 1875, 1877, 1879, 1881, 1883, 1885, 1887, 1889, 1891, 1893, 1895, 1897, 1899, 1901, 1903, 1905, 1907, 1909, 1911, 1913, 1915, 1917, 1919, 1921, 1923, 1925, 1927, 1929, 1931, or a sequence having at least 90% sequence identity thereto, the 5′ phosphate group is replaced with an OH group.

[0058] In further embodiments of the RNAi agents disclosed herein, the antisense strand comprises a sequence selected from the group consisting of SEQ ID Nos: 1932-2317 or a sequence having at least 90% sequence identity thereto.

[0059] In other embodiments disclosed herein are RNAi agents having a delivery moiety of Formula I conjugated to R:

[chemical structure]

wherein R comprises a sense strand and an antisense strand, wherein the antisense strand comprises at least 15 contiguous nucleotides that have complementarity to HMGCR mRNA target sequence of SEQ ID NO:1, and wherein the sense strand and the antisense strand form a region of complementarity of at least 15 nucleotides, and wherein the sense strand and antisense strand are each independently 18 to 23 nucleotides in length, and optionally wherein the sense strand and antisense strand each independently comprise one or more modified nucleotides, and optionally wherein the sense strand and the antisense strand each independently comprise one or more modified internucleotide linkages, and wherein R is conjugated to Formula I via a linker. In further embodiments, the sense or the antisense strand is selected from Table 2, 3, 4A or 4B disclosed herein. In other embodiments, the antisense or antisense strand of the RNAi agent has an antisense strand sequence and/or a sense strand sequence of at least 80%, 81%, 82%, 83%, 84%, 85%, 86%, 87%, 88%, 89%, 90%, 91%, 92%, 93%, 94%, 95%, 96%, 97%, 98%, or 99% sequence identity to the corresponding sequence selected from a Table 2, 3, 4A or 4B herein.

[0060] In other embodiments, the RNAi agent disclosed herein comprises a linker. In further embodiments, R is conjugated to Formula I via a linker. In other further embodiments R is conjugated to Formula I via a linker. In further embodiments, the linker comprises a linker of Formula II having connection points A and B or the linker comprises Formula III having connection points C and D, and wherein:

[chemical structure]

[0061] a. the RNAi agent comprises Formula I conjugated to Formula II at connection point A and Formula II is conjugated to a phosphate group at connection point B, and the phosphate group is conjugated to R; or
[0062] b. the RNAi agent comprises Formula I conjugated to Formula III at connection point C and Formula III is conjugated to a phosphate group at connection point D, and the phosphate group is further conjugated to R.

[0063] In other embodiments wherein the RNAi agent comprises a linker, R is conjugated to Formula I via a linker, and the linker is a linker comprising Formula III having connection points C and D:

[chemical structure]

and wherein the RNAi agent comprises Formula I conjugated to Formula III at connection point C and Formula III is conjugated to a phosphate group at connection point D, and the phosphate group is further conjugated to R.

[0064] In still other embodiments, the RNAi agent is capable of decreasing expression of the HMGCR gene in a liver cell. In other embodiments, the RNAi agents disclosed herein are for use in therapy. In some embodiments, the use is for the treatment of a disease or disorder associated with ASCVD. In further embodiments, the use is for the treatment of dyslipidemia, primary dysbetalipoproteinemia, hypertriglyceridemia, or atherosclerosis. In some embodiments, the use is for the treatment of dyslipidemia. In some embodiments, the use is for the treatment of primary dysbetalipoproteinemia. In some embodiments, the use is for the treatment of hypertriglyceridemia. In some embodiments, the use is for the treatment of atherosclerosis. In further embodiments, the dyslipidemia is hypercholesteremia. In other embodiments, the use is to reduce the risk of one or more of myocardial infarction (MI), stroke, revascularization procedures, and angina. In other embodiments, the use to reduce such risk is in adult patients without cardiovascular heart disease (CHD), but with one or more risk factors for any one or more of the recited health events. In other embodiments, the use is to reduce the risk of MI and/or stroke, e.g., in adult patients with type 2 diabetes without CHD, but with one or more risk factors. In other embodiments, the use is to reduce the risk of one or more of non-fatal MI, fatal and non-fatal stroke, revascularization procedures, hospitalization for CHF, and angina, in adult patients with CHD. In other embodiments, the use is to reduce one or more of elevated total-C, LDL-C, apo B, and TG levels, and/or to increase HDLC in adult patients with primary hyperlipidemia (heterozygous familial and nonfamilial) and mixed dyslipidemia. In other embodiments, the use is to reduce elevated triglycerides (TG) in adult patients with hypertriglyceridemia and primary dysbetalipoproteinemia. In other embodiments, the use is to reduce total-C and LDL-C in patients with homozygous familial hypercholesterolemia (HoFH). In still other embodiments, the use is to reduce one or more of elevated total-C, LDL-C, and apo B levels in pediatric patients, 10 years to 17 years of age, with heterozygous familial hypercholesterolemia (HeFH), e.g. after failing an adequate trial of diet therapy. In other embodiments, the use is for treatment of any of the preceding, after statin use failed to control one or more symptoms, e.g. failed to reduce one or more of elevated total-C, LDL-C, apo B, and/or failed to increase HDLC. In other embodiments, the use is for the treatment of any of the preceding, in patients that are statin intolerant; in further embodiments, the use is for lowering LDL-C in patients that are statin intolerant. In further embodiments, the use is for any of the preceding uses, after alteration of diet failed to control one or more symptoms. In other further embodiments, the use is for any of the preceding uses, as an adjunct therapy to diet.

[0065] The RNAi agents may be formulated into pharmaceutical compositions. Accordingly, disclosed herein are pharmaceutical compositions comprising the RNAi agent disclosed herein, and one or more pharmaceutically acceptable excipients. Pharmaceutical compositions can be prepared by methods well known in the art (e.g., Remington: The Science and Practice of Pharmacy, 23rd edition (2020), A. Loyd et al., Academic Press).

[0066] In other embodiment are uses of the RNAi agents herein for the manufacture of a medicament for the treatment of dyslipidemia or any of the uses recited in the preceding paragraph.

[0067] In other embodiments are methods of treating dyslipidemia, in patients in need thereof, comprising administering an RNAi agent disclosed herein, or a pharmaceutical composition thereof. In other embodiments are methods of treating dyslipidemia, or any of the uses recited above, in patients in need thereof, or a pharmaceutical composition thereof. In other embodiments are methods of treating a patient unable to achieve lipid levels following statin and/or diet therapy, comprising administering to the patient an RNAi agent disclosed herein, or a pharmaceutical composition thereof.

[0068] The RNAi agent can be administered to the patient intravenously or subcutaneously.

[0069] RNAi dosage regimens may be adjusted to provide the optimum desired response (e.g., a therapeutic response). For example, a single bolus may be administered, several divided doses may be administered over time, or the dose may be proportionally reduced or increased as indicated by the exigencies of the therapeutic situation.

[0070] Dosage values may vary with the type and severity of the condition to be alleviated. It is further understood that for any particular subject, specific dosage regimens should be adjusted over time according to the individual need and the professional judgment of the person administering or supervising the administration of the compositions.

[0071] In other embodiments are methods of decreasing HMGCR expression in a cell, comprising contacting the cell with an RNAi agent disclosed herein, and incubating the cell for a time sufficient for decreasing the level of HMGCR mRNA by at least 50% as compared to an untreated or control treated cell.

[0072] Certain abbreviations are defined as follows: “1,2-DCE” refers to 1,2-dichloroethane; “DCM” refers to dichloromethane; “DIEA” refers to N,N-diisopropylethylamine; “DMF” refers to N,N-dimethylformamide; “DMAP” refers to 4-dimethylaminopyridine; “DMTCl” refers to 4,4′-dimethoxytrityl chloride; “DPP4” refers to dipeptidyl peptidase; “EDC” refers to 1-ethyl-3-(3-dimethylaminopropyl)carbodiimide; “EtOAc” refers to ethyl acetate; “GalNAc” refers to N-acetylgalactosamine; “HATU” refers to 1-[bis(dimethylamino)methylene]-1H-1,2,3-triazolo[4,5-b]pyridinium 3-oxid hexafluorophosphate; “HBTU” refers to O-(benzotriazol-1-yl)-N,N,N′,N′-tetramethyluronium hexafluorophosphate; “HOBt” refers to 1-hydroxybenzotriazole hydrate; “HPRT” refers to hypoxanthine-guanine phosphoribosyltransferase; “IPA” refers to isopropanol and isopropyl alcohol; “LDHA” refers to lactate dehydrogenase-A; “MeCN” refers to acetonitrile; “MeOH” refers to methanol and methyl alcohol; “MWCO” refers to molecular weight cut-off; “NHS” refers to N-hydroxysuccinimide; “OD” refers to optical density; “PBS” refers to phosphate-buffered saline; “PhSiH₃” refers to phenylsilane; “PTS” refers to portable endotoxin testing system; “siRNA” refers to small interfering ribonucleic acid; “TEA” refers to triethylamine; “TFA” refers to trifluoroacetic acid; “THF” refers to tetrahydrofuran; “TLC” refers to thin line chromatography; and “TMP” refers to 2,2,6,6-tetramethylpiperidine.

[0073] A delivery moiety comprising Formula I may be made by the following non-limiting synthetic steps and schemes.

[chemical structure]

[0074] Scheme 1, step A, depicts the cyclization of compound (1) using trimethyl trifluoromethanesulfonate in a solvent such as 1,2-DCE to give compound (2). Step B shows the addition of hex-5-en-1-ol to compound (2) using trimethylsilyl trifluoromethanesulfonate in a solvent such as 1,2-DCE to give compound (3). The oxidation of compound (3) using an appropriate oxidizing agent such as sodium periodate with a catalyst such as ruthenium(III) chloride to give compound (4) is shown in step C.

[chemical structure]

[0075] Scheme 2, step A, shows an amide coupling between compound (5) and tert-butyl N-[2-[2-(tert-butoxycarbonylamino)ethylamino]ethyl]carbamate using HBTU and HOBt with an appropriate base such as DIEA in a solvent such as DMF to give compound (6). Step B depicts a basic hydrolysis of compound (6) using a base such as aqueous NaOH in a THF and MeOH solvent system to give compound (7). Step C shows an amide coupling between compound (7) and allyl 11-aminoundecanoate hydrochloride using HATU with an appropriate base such as DIEA in a solvent such as DMF to give compound (8). Step D shows the acidic deprotection of compound (8) with TFA in a solvent such as DCM to give compound (9). The amide coupling between compound (9) and compound (4) using EDC and HOBt in a solvent such as DCM to give compound (10) is shown in step E. Step F shows the deprotection of compound (10) with tetrakis(triphenylphosphine)palladium and PhSiH₃ in a solvent such as DCM to give compound (11). Step F depicts the coupling of compound (11) with NHS using EDC in a solvent such as DCM to give compound (12).

[chemical structure]

[0076] Scheme 3, steps A-C are essentially analogous to those of scheme 2, steps C-E beginning with compound (7) to give compounds (13), (14), and (15). Step D depicts the hydrogenation of compound (15) using palladium on carbon in a solvent such as MeOH to give compound (16). Step E is essentially analogous to the preparation of scheme 2, step G to give compound (17).

[chemical structure]

[0077] Scheme 4, steps A-I, are composed of a series of amide couplings and deprotections using methods essentially analogous to those found in schemes 2 and 3 beginning with compound (18) to give compound (27).

[chemical structure]

[0078] Scheme 5, steps A-C depict methods essentially analogous to those found in scheme 4, steps G-I beginning with compound (24) to give compound (30).

[chemical structure]

[0079] Scheme 6, step A depicts the protection of compound (31) using DMTCl with a suitable base such as DIEA in a solvent such as DCM to give compound (32). Step B shows an amide coupling between compound (32) and piperidin-4-yl methanol using HBTU and HOBt with TMP in a solvent such as DCM to give compound (33). The deprotection of compound (33) with 20% piperidine in DMF to give compound (34) is shown in step C.

[chemical structure]

[0080] Scheme 7, step A is essentially analogous to scheme 2, step A to give compound (35) from the coupling of compounds (16) and (34). Step B shows the formation of compound (36) by adding succinic anhydride to compound (35) in an appropriate solvent such as DCM with a base system of TEA and DMAP. Step C depicts the loading of compound (36) onto resin with 2-(1H-benzotriazol-1-yl)-1,1,3,3-tetramethyluronium hexafluorophosphate and a base such as DIEA in a solvent system such as MeCN and DCM to give compound (37).

### Preparation 1

### (6,7-Diacetoxy-2-methyl-5,6,7,7a-tetrahydro-3aH-pyrano[3,2-d]oxazol-5-yl)methyl acetate

[chemical structure]

[0081] To a solution of (5-acetamido-3,4,6-triacetoxy-tetrahydropyran-2-yl)methyl acetate (9.00 g, 23.1 mmol) in 1,2-DCE (46 mL) is added trimethylsilyl trifluoromethanesulfonate (6.5 mL, 35 mmol). The mixture is heated to 50° C. and stirred for 18 hours. After this time, the mixture is diluted with DCM (200 mL), washed with saturated NaHCO₃ (200 mL), and saturated aqueous sodium chloride solution (200 mL), dried over sodium sulfate, filtered, and concentrated in vacuo. The resulting residue is purified by silica gel flash chromatography eluting with 0-10% MeOH/DCM to give the title compound (6.434 g, 84%). ES/MS m/z 330 (M+H).

### Preparation 2

### (5-Acetamido-3,4-diacetoxy-6-hex-5-enoxy-tetrahydropyran-2-yl)methyl acetate

[chemical structure]

[0082] To a solution of (6,7-diacetoxy-2-methyl-5,6,7,7a-tetrahydro-3aH-pyrano[3,2-d]oxazol-5-yl)methyl acetate (30.43 g, 92.42 mmol) in 1,2-DCE (231 mL) is added hex-5-en-1-ol (22.2 mL, 185 mmol) followed by activated powdered 4 Å molecular sieves (15.6 g). The suspension is stirred at ambient temperature for 30 minutes and trimethylsilyl trifluoromethanesulfonate (19 mL, 101.9 mmol) is then added. The mixture is stirred at ambient temperature for 18 hours. After this time, the solution is filtered through diatomaceous earth and concentrated in vacuo. The resulting residue is purified by silica gel flash chromatography eluting with 30-100% EtOAc/hexanes to give the title compound (34.76 g, 86%). ES/MS m/z 430.4 (M+H).

### Preparation 3

### 5-[3-Acetamido-4,5-diacetoxy-6-(acetoxymethyl)tetrahydropyran-2-yl]oxypentanoic acid

[chemical structure]

[0083] A solution of (5-acetamido-3,4-diacetoxy-6-hex-5-enoxy-tetrahydropyran-2-yl)methyl acetate (34.76 g, 80.93 mmol) in MeCN (174 mL) and DCM (174 mL) is cooled to 0° C. A solution of sodium periodate (22.4 g, 104.7 mmol) is added and stirring is continued at 0° C. for 10 minutes. After this time, ruthenium(III) chloride (270 mg, 1.3 mmol) is added and the mixture is stirred while warming to ambient temperature. After stirring for 2 hours, additional sodium periodate (66 g, 308.4 mmol) is added and stirring is continued for 18 hours. After this time, the mixture is extracted with 3:1 CH₃Cl:IPA (2×500 mL), washed with saturated aqueous sodium chloride solution (1 L), dried over sodium sulfate, filtered, and concentrated in vacuo. The resulting residue is purified by silica gel flash chromatography eluting with 0-40% MeOH/DCM to give the title compound (29.75 g, 82%). ES/MS m/z 448.4 (M+H).

### Preparation 4

### Benzyl 6-aminohexanoate hydrochloride

[chemical structure]

[0084] To a suspension of 6-aminohexanoic acid (5.00 g, 38.1 mmol) in THF (38 mL) is added benzyl alcohol (47 mL, 453.7 mmol) and the mixture is cooled to 0° C. Thionyl chloride (8.6 mL, 120 mmol) is added dropwise and the mixture is stirred for 18 hours while warming to ambient temperature. After this time, ether (166 mL) is added and the reaction vessel is transferred to a freezer at −20° C. for 1 hour. After this time, the solid precipitate is collected by filtration to give the title compound (8.57 g, 81%). ES/MS m/z 222 (M+H).

### Preparation 5

### Benzyl 11-aminoundecanoate hydrochloride

[chemical structure]

[0085] The title compound is prepared from 11-aminoundecanoic acid in a manner essentially analogous to the method of preparation 4. ES/MS m/z 292.2 (M+H).

### Preparation 6

### Allyl 11-aminoundecanoate hydrochloride

[chemical structure]

[0086] A vessel is charged with 11-aminoundecanoic acid (9.00 g, 44.7 mmol) in allyl alcohol (42 mL) and the mixture is cooled to 0° C. Thionyl chloride (6.5 mL, 89.4 mmol) is added and the mixture is stirred for 18 hours while warming to ambient temperature. After this time, the mixture is concentrated in vacuo and ether (200 mL) is added to the residue to obtain a white suspension. The mixture is stirred at ambient temperature for 10 minutes and the solid precipitate is collected by filtration to obtain the product (12.0 g, 97%). ES/MS m/z 242.2 (M+H).

### Preparation 7

### (2S)-3-[Bis(4-methoxyphenyl)-phenyl-methoxy]-2-(9H-fluoren-9ylmethoxycarbonylamino) propanoic acid

[chemical structure]

[0087] To a stirring solution of (2S)-2-(9H-fluoren-9-ylmethoxycarbonylamino)-3-hydroxy-propanoic acid (40 g, 0.122 mol) in dry DCM (400 mL) is added DIEA (64 mL, 0.366 mol) at 0° C. under inert atmosphere. To this, a solution of DMTCl (49.6 g, 0.146 mol) in DCM (200 mL) is added slowly. The resulting reaction mixture is brought to ambient temperature and stirred for 16 hours. After this time, the reaction mixture is diluted with water (12.5 vol) and extracted with DCM (25 vol). The organic layer is dried over anhydrous sodium sulphate, filtered, and concentrated in vacuo. The crude obtained is washed with 10% EtOAc/hexane (12.5 vol) and dried under vacuum to give the title compound as a pale brown solid (62 g, crude). This material was taken to next step without any further purification.

[0088] TLC: 5% MeOH/CH₂Cl₂ (R_{f}: 0.5) UV, 254 nM.

### Preparation 8

### 9H-Fluoren-9-ylmethyl N-[(1S)-1-[[bis(4-methoxyphenyl)-phenyl-methoxy]methyl]-2-[4-(hydroxymethyl)-1-piperidyl]-2-oxo-ethyl]carbamate

[chemical structure]

[0089] To a stirring solution of (2S)-3-[bis(4-methoxyphenyl)-phenyl-methoxy]-2-(9H-fluoren-9ylmethoxycarbonylamino) propanoic acid (62 g, 0.103 mol) in DCM (750 mL) are added slowly HBTU (78.3 g, 0.206 mol), HOBt (27.9 g, 0.206 mol), and piperidin-4-yl methanol (15.4 g, 0.134 mol) followed by TMP (15 mL, 0.113 mol) at 0° C. under inert atmosphere. The resulting reaction mixture is brought to ambient temperature and stirred for 4 hours. After this time, the reaction mixture is diluted with water (8 vol) and extracted with DCM (15 vol). The organic layer is dried over anhydrous sodium sulphate, filtered, and concentrated in vacuo. The resulting residue is purified by silica gel flash chromatography eluting with 20-40% EtOAc/hexane and 1% MeOH/DCM to give the title compound (40 g, 52% over two steps). ¹H NMR (DMSO-d₆) δ 7.88 (br d, J=7.5 Hz, 2H), 7.79-7.59 (m, 3H), 7.45-7.12 (m, 13H), 6.92-6.76 (m, 4H), 4.79-4.44 (m, 2H), 4.32 (br d, J=11.4 Hz, 2H), 4.20 (br s, 2H), 3.71 (s, 6H), 3.21 (br s, 4H), 2.99-2.79 (m, 1H), 2.69 (br s, 2H), 1.81-1.43 (m, 3H), 1.08-0.73 (m, 2H).

### Preparation 9

### (2S)-2-Amino-3-[bis(4-methoxyphenyl)-phenyl-methoxy]-1-[4-(hydroxymethyl)-1-piperidyl]propan-1-one

[chemical structure]

[0090] A solution of 20% piperidine in DMF (400 mL) is added slowly to 9H-fluoren-9-ylmethyl N-[(1S)-1-[[bis(4-methoxyphenyl)-phenyl-methoxy]methyl]-2-[4-(hydroxymethyl)-1-piperidyl]-2-oxo-ethyl]carbamate (40 g, 0.055 mol) at 0° C. under inert atmosphere. The resulting reaction mixture is stirred at ambient temperature for 1 hour. After this time, the mixture is diluted with water (15 vol) and extracted with EtOAc (30 vol). The organic layer is dried over anhydrous sodium sulphate, filtered, and concentrated in vacuo. The resulting residue is purified by silica gel flash chromatography eluting with 1-8% MeOH/DCM to give the title compound as an off white solid (13 g, 47%). ES/MS m/z 1009.5 (2M+H).

### Preparation 10

### Methyl (2S)-5-[bis[2-(tert-butoxycarbonylamino)ethyl]amino]-2-(tert-butoxycarbonylamino)-5-oxo-pentanoate

[chemical structure]

[0091] To a flask containing (S)-4-((tert-butoxycarbonyl)amino)-5-methoxy-5-oxopentanoic acid (7.00 g, 26.8 mmol) and HOBt (4.16 g, 30.8 mmol) are added DMF (179 mL) and (2-(1H-benzotriazol-1-yl)-1,1,3,3-tetramethyluronium hexafluorophosphate (11.7 g, 30.9 mmol). DIEA (14 mL, 80.3 mmol) is added and the mixture is stirred at ambient temperature for 5 minutes. After this time, tert-butyl N-[2-[2-(tert-butoxycarbonylamino)ethylamino]ethyl]carbamate (8.94 g, 29.5 mmol) is added in one portion and stirring is continued at ambient temperature. After stirring for 18 hours, the mixture is diluted with EtOAc (400 mL), washed with water (2×400 mL) and saturated aqueous sodium chloride solution (400 mL), dried over sodium sulfate, filtered, and concentrated in vacuo. The resulting residue is purified by silica gel flash chromatography eluting with 40-100% EtOAc/hexanes to give the title compound (13.01 g, 89%). ES/MS m/z 547.40 (M+H).

### Preparation 11

### (2S)-5-[Bis[2-(tert-butoxycarbonylamino)ethyl]amino]-2-(tert-butoxycarbonylamino)-5-oxo-pentanoic acid

[chemical structure]

[0092] A flask is charged with methyl (2S)-5-[bis[2-(tert-butoxycarbonylamino)ethyl]amino]-2-(tert-butoxycarbonylamino)-5-oxo-pentanoate (13.01 g, 23.8 mmol), THF (120 mL), and MeOH (120 mL). 1N NaOH (71 mL, 71 mmol) is added and the mixture is stirred at ambient temperature. After 1 hour, the mixture is concentrated in vacuo and redissolved in water (300 mL). 5N HCl (12 mL) is added to bring the pH to 4. The mixture is extracted with DCM (3×300 mL) and the combined organic layers are washed with saturated aqueous sodium chloride solution (1 L), dried over sodium sulfate, filtered, and concentrated to give the title compound (12.41 g, 98%). ES/MS m/z 531.60 (M−H).

### Preparation 12

### Allyl 11-[[(2S)-5-[bis[2-(tert-butoxycarbonylamino)ethyl]amino]-2-(tert-butoxycarbonylamino)-5-oxo-pentanoyl]amino]undecanoate

[chemical structure]

[0093] To a flask containing (2S)-5-[bis[2-(tert-butoxycarbonylamino)ethyl]amino]-2-(tert-butoxycarbonylamino)-5-oxo-pentanoic acid (500 mg, 0.94 mmol) and allyl 11-aminoundecanoate hydrochloride (313 mg, 1.13 mmol) is added DMF (6.25 mL) and (1-[bis(dimethylamino)methylene]-1H-1,2,3-triazolo[4,5-b]pyridinium 3-oxide hexafluorophosphate (428 mg, 1.12 mmol). Following addition of DIEA (0.5 mL, 3 mmol) the mixture is stirred at ambient temperature for 18 hours. After this time, the mixture is diluted with EtOAc (200 mL), washed with water (3×200 mL) and saturated aqueous sodium chloride solution (200 mL), dried over sodium sulfate, filtered, and concentrated in vacuo. The resulting residue is purified by silica gel flash chromatography eluting with 40-100% EtOAc/hexanes to give the title compound (687 mg, 97%). ¹H NMR (DMSO-d6) δ 7.78-7.64 (m, 1H), 6.98-6.7 (m, 2H), 5.96-5.84 (m, 1H), 5.31-5.25 (m, 1H), 5.23-5.17 (m, 1H), 4.56-4.50 (m, 2H), 3.88-3.67 (m, 1H), 3.30-3.19 (m, 4H), 3.11-2.91 (m, 6H), 2.35-2.12 (m, 4H), 1.88-1.65 (m, 2H), 1.58-1.47 (m, 2H), 1.46-1.30 (m, 30H), 1.30-1.18 (m, 12H).

### Preparation 13

### Allyl (S)-11-(2-amino-5-(bis(2-aminoethyl)amino)-5-oxopentanamido)undecanoate

[chemical structure]

[0094] To a solution of allyl 11-[[(2S)-5-[bis[2-(tert-butoxycarbonylamino)ethyl]amino]-2-(tert-butoxycarbonylamino)-5-oxo-pentanoyl]amino]undecanoate (687 mg, 0.91 mmol) in DCM (15 mL) is added TFA (15 mL). The mixture is stirred at ambient temperature. After 1.5 hours, the mixture is concentrated in vacuo. The residue is taken up in MeOH and applied to an ion exchange cartridge. The cartridge is eluted with MeOH (150 mL) followed by 7N NH₃/MeOH (150 mL). The basic fraction is concentrated in vacuo to give the title compound (410 mg, 99%). ES/MS m/z 456.4 (M+H).

### Preparation 14

### Allyl 11-[[(2S)-2-[5-[3-acetamido-4,5-diacetoxy-6-(acetoxymethyl)tetrahydropyran-2-yl]oxypentanoylamino]-5-[bis[2-[5-[3-acetamido-4,5-diacetoxy-6-(acetoxymethyl)tetrahydropyran-2-yl]oxypentanoylamino]ethyl]amino]-5-oxo-pentanoyl]amino]undecanoate

[chemical structure]

[0095] A flask is charged with 5-[3-acetamido-4,5-diacetoxy-6-(acetoxymethyl)tetrahydropyran-2-yl]oxypentanoic acid (489 mg, 1.09 mmol) and allyl (S)-11-(2-amino-5-(bis(2-aminoethyl)amino)-5-oxopentanamido)undecanoate (150 mg, 0.33 mmol). DCM (3.35 mL) is added followed by 1-hydroxybenzotriazole monohydrate (164 mg, 1.07 mmol) and 1-(3-dimethylaminopropyl)-3-ethylcarbodiimide hydrochloride (206 mg, 1.07 mmol). The mixture is stirred at ambient temperature for 18 hours. After this time, the solution is diluted with EtOAc (100 mL), washed with saturated NaHCO₃ (2×100 mL), saturated aqueous NH₄Cl (100 mL), and saturated aqueous sodium chloride solution (100 mL). The organic layer is dried over sodium sulfate, filtered, and concentrated in vacuo. The resulting residue is purified by silica gel flash chromatography eluting with 0-10% MeOH/DCM to give the title compound (424 mg, 74%). ES/MS m/z 872.80 (M+2H)/2.

### Preparation 15

### 11-[[(2S)-2-[5-[3-Acetamido-4,5-diacetoxy-6-(acetoxymethyl)tetrahydropyran-2-yl]oxypentanoylamino]-5-[bis[2-[5-[3-acetamido-4,5-diacetoxy-6-(acetoxymethyl)tetrahydropyran-2-yl]oxypentanoylamino]ethyl]amino]-5-oxo-pentanoyl]amino]undecanoic acid

[chemical structure]

[0096] To a solution of allyl 11-[[(2S)-2-[5-[3-acetamido-4,5-diacetoxy-6-(acetoxymethyl)tetrahydropyran-2-yl]oxypentanoylamino]-5-[bis[2-[5-[3-acetamido-4,5-diacetoxy-6-(acetoxymethyl)tetrahydropyran-2-yl]oxypentanoylamino]ethyl]amino]-5-oxo-pentanoyl]amino]undecanoate (354 mg, 0.20 mmol) in DCM (2 mL) is added tetrakis(triphenylphosphine)palladium (29 mg, 0.02 mmol) followed by PhSiH₃ (51 uL, 0.41 mmol). The mixture is stirred at ambient temperature for 2 hours, after which it is diluted with saturated aqueous NaHCO₃ (100 mL). 1N NaOH (15 mL) is added to bring the pH to about 10. The aqueous solution is washed with DCM (3×100 mL) and then acidified with concentrated HCl (5 mL) and then aqueous 5N HCl (15 mL). The aqueous layer is extracted with DCM (100 mL) and the organic layer is dried over sodium sulfate, filtered, and concentrated in vacuo. The resulting residue is purified by silica gel flash chromatography eluting with 0-20% MeOH/DCM to give the title compound (151 mg, 44%). ES/MS m/z 852.60 (M+2H)/2.

### Preparation 16

### (2,5-Dioxopyrrolidin-1-yl) 11-[[(2S)-2-[5-[3-acetamido-4,5-diacetoxy-6-(acetoxymethyl)tetrahydropyran-2-yl]oxypentanoylamino]-5-[bis[2-[5-[3-acetamido-4,5-diacetoxy-6-(acetoxymethyl)tetrahydropyran-2-yl]oxypentanoylamino]ethyl]amino]-5-oxo-pentanoyl]amino]undecanoate

[chemical structure]

[0097] To a reaction vial are added 11-[[(2S)-2-[5-[3-acetamido-4,5-diacetoxy-6-(acetoxymethyl)tetrahydropyran-2-yl]oxypentanoylamino]-5-[bis[2-[5-[3-acetamido-4,5-diacetoxy-6-(acetoxymethyl)tetrahydropyran-2-yl]oxypentanoylamino]ethyl]amino]-5-oxo-pentanoyl]amino]undecanoic acid (50 mg, 0.03 mmol), N-hydroxysuccinimide (5 mg, 0.04 mmol), and 1-(3-dimethylaminopropyl)-3-ethylcarbodiimide hydrochloride (8 mg, 0.04 mmol). DCM (0.3 mL) is added and the mixture is stirred at ambient temperature. After 18 hours, the mixture is loaded directly onto a silica gel cartridge and the crude mixture is purified by silica gel flash chromatography eluting with 0-10% MeOH/DCM to give the title compound (49 mg, 93%). ES/MS m/z 901.40 (M+2H)/2.

### Preparation 17

### Benzyl 6-[[(2S)-5-[bis[2-(tert-butoxycarbonylamino)ethyl]amino]-2-(tert-butoxycarbonylamino)-5-oxo-pentanoyl]amino]hexanoate

[chemical structure]

[0098] The title compound is prepared from (2S)-5-[bis[2-(tert-butoxycarbonylamino)ethyl]amino]-2-(tert-butoxycarbonylamino)-5-oxo-pentanoic acid and benzyl 6-aminohexanoate hydrochloride in a manner essentially analogous to the method of preparation 10. ES/MS m/z 736.40 (M+H).

### Preparation 18

### Benzyl 6-[[(2S)-2-amino-5-[bis(2-aminoethyl)amino]-5-oxo-pentanoyl]amino]hexanoate tris(trifluoroacetic acid)

[chemical structure]

[0099] To a solution of benzyl 6-[[(2S)-5-[bis[2-(tert-butoxycarbonylamino)ethyl]amino]-2-(tert-butoxycarbonylamino)-5-oxo-pentanoyl]amino]hexanoate (15.47 g, 21.02 mmol) in DCM (105 mL) is added TFA (16 mL, 210.2 mmol). The mixture is stirred at ambient temperature for 24 hours. After this time, additional TFA (16 mL, 210.2 mmol) is added and stirring is continued for an additional 2 hours. After this time, the mixture is concentrated in vacuo. The resulting residue is azeotroped with toluene (2×30 mL). The resulting oil is further dried in a vacuum oven at 40° C. for 4 hours to give the title compound (28.08 g, 58% purity accounting for residual toluene, 99+%). ES/MS m/z 436.40 (M+H). The compound is dissolved in 70 mL DMF to make a 0.3M solution that is used in the next step.

### Preparation 19

### Benzyl 6-[[(2S)-2-[5-[3-acetamido-4,5-diacetoxy-6-(acetoxymethyl)tetrahydropyran-2-yl]oxypentanoylamino]-5-[bis[2-[5-[3-acetamido-4,5-diacetoxy-6-(acetoxymethyl)tetrahydropyran-2-yl]oxypentanoylamino]ethyl]amino]-5-oxo-pentanoyl]amino]hexanoate

[chemical structure]

[0100] The title compound is prepared from 5-[3-acetamido-4,5-diacetoxy-6-(acetoxymethyl)tetrahydropyran-2-yl]oxypentanoic acid and benzyl 6-[[(2S)-2-amino-5-[bis(2-aminoethyl)amino]-5-oxo-pentanoyl]amino]hexanoate tris trifluoroacetic acid and in a manner essentially analogous to the method of preparation 10. ES/MS m/z 862 (M+2H)/2.

### Preparation 20

### 6-[[(2S)-2-[5-[3-Acetamido-4,5-diacetoxy-6-(acetoxymethyl)tetrahydropyran-2-yl]oxypentanoylamino]-5-[bis[2-[5-[3-acetamido-4,5-diacetoxy-6-(acetoxymethyl)tetrahydropyran-2-yl]oxypentanoylamino]ethyl]amino]-5-oxo-pentanoyl]amino]hexanoic acid

[chemical structure]

[0101] Palladium on carbon (1.90 g, 0.89 mmol, 5 mass %, 50% wet) is placed in a round-bottom flask and the vessel is evacuated and backfilled with nitrogen three times. A solution of benzyl 6-[[(2S)-2-[5-[3-acetamido-4,5-diacetoxy-6-(acetoxymethyl)tetrahydropyran-2-yl]oxypentanoylamino]-5-[bis[2-[5-[3-acetamido-4,5-diacetoxy-6-(acetoxymethyl)tetrahydropyran-2-yl]oxypentanoylamino]ethyl]amino]-5-oxo-pentanoyl]amino]hexanoate (15.41 g, 8.94 mmol) in MeOH (178 mL) is added via syringe. The flask is evacuated and backfilled with 1 atm hydrogen and the mixture is stirred at ambient temperature under 1 atm hydrogen for 18 hours. After this time, the mixture is filtered through diatomaceous earth and the filtrate is concentrated in vacuo to give the title compound (13.85 g, 95%). ES/MS m/z 817.2 (M+2H)/2.

### Preparation 21

### (2,5-Dioxopyrrolidin-1-yl) 6-[[(2S)-2-[5-[3-acetamido-4,5-diacetoxy-6-(acetoxymethyl)tetrahydropyran-2-yl]oxypentanoylamino]-5-[bis[2-[5-[3-acetamido-4,5-diacetoxy-6-(acetoxymethyl)tetrahydropyran-2-yl]oxypentanoylamino]ethyl]amino]-5-oxo-pentanoyl]amino]hexanoate

[chemical structure]

[0102] The title compound is prepared from 6-[[(2S)-2-[5-[3-acetamido-4,5-diacetoxy-6-(acetoxymethyl)tetrahydropyran-2-yl]oxypentanoylamino]-5-[bis[2-[5-[3-acetamido-4,5-diacetoxy-6-(acetoxymethyl)tetrahydropyran-2-yl]oxypentanoylamino]ethyl]amino]-5-oxo-pentanoyl]amino]hexanoic acid in a manner essentially analogous to the method of preparation 16. ES/MS m/z 866.20 (M+2H)/2.

### Preparation 22

### Benzyl (2S)-5-[bis[2-(tert-butoxycarbonylamino)ethyl]amino]-2-(tert-butoxycarbonylamino)-5-oxo-pentanoate

[chemical structure]

[0103] The title compound is prepared from tert-butyl N-[2-[2-(tert-butoxycarbonylamino)ethylamino]ethyl]carbamate and (4S)-5-benzyloxy-4-(tert-butoxycarbonylamino)-5-oxo-pentanoic acid in a manner essentially analogous to the method of preparation 12. ES/MS m/z 623.6 (M+H).

### Preparation 23

### Benzyl (2S)-2-amino-5-[bis(2-aminoethyl)amino]-5-oxo-pentanoate tris(trifluoroacetic acid) salt

[chemical structure]

[0104] The title compound is prepared from benzyl (2S)-5-[bis[2-(tert-butoxycarbonylamino)ethyl]amino]-2-(tert-butoxycarbonylamino)-5-oxo-pentanoate in a manner essentially analogous to the method of preparation 18. ES/MS m/z 323.2 (M+H).

### Preparation 24

### Benzyl (2S)-5-[bis[2-[5-(tert-butoxycarbonylamino)pentanoylamino]ethyl]amino]-2-[5-(tert-butoxycarbonylamino)pentanoylamino]-5-oxo-pentanoate

[chemical structure]

[0105] The title compound is prepared from 5-(tert-butoxycarbonylamino)pentanoic acid and benzyl (2S)-2-amino-5-[bis(2-aminoethyl)amino]-5-oxo-pentanoate tris(trifluoroacetic acid) salt in a manner essentially analogous to the method of preparation 10. ES/MS m/z 920.6 (M+H).

### Preparation 25

### Benzyl (2S)-2-(5-aminopentanoylamino)-5-[bis[2-(5-aminopentanoylamino)ethyl]amino]-5-oxo-pentanoate tris(trifluoroacetic acid) salt

[chemical structure]

[0106] The title compound is prepared from benzyl (2S)-5-[bis[2-[5-(tert-butoxycarbonylamino)pentanoylamino]ethyl]amino]-2-[5-(tert-butoxycarbonylamino)pentanoylamino]-5-oxo-pentanoate in a manner essentially analogous to the method of preparation 18. ES/MS m/z 620.4 (M+H).

### Preparation 26

### Benzyl (2S)-2-[5-[5-[3-acetamido-4,5-diacetoxy-6-(acetoxymethyl)tetrahydropyran-2-yl]oxypentanoylamino]pentanoylamino]-5-[bis[2-[5-[5-[3-acetamido-4,5-diacetoxy-6-(acetoxymethyl)tetrahydropyran-2-yl]oxypentanoylamino]pentanoylamino]ethyl]amino]-5-oxo-pentanoate

[chemical structure]

[0107] The title compound is prepared from 5-[3-acetamido-4,5-diacetoxy-6-(acetoxymethyl)tetrahydropyran-2-yl]oxypentanoic acid and benzyl (2S)-2-(5-aminopentanoylamino)-5-[bis[2-(5-aminopentanoylamino)ethyl]amino]-5-oxo-pentanoate tris(trifluoroacetic acid) salt and in a manner essentially analogous to the method of preparation 10. ES/MS m/z 954.80 (M+2H)/2.

### Preparation 27

### (2S)-2-[5-[5-[3-Acetamido-4,5-diacetoxy-6-(acetoxymethyl)tetrahydropyran-2-yl]oxypentanoylamino]pentanoylamino]-5-[bis[2-[5-[5-[3-acetamido-4,5-diacetoxy-6-(acetoxymethyl)tetrahydropyran-2-yl]oxypentanoylamino]pentanoylamino]ethyl]amino]-5-oxo-pentanoic acid

[chemical structure]

[0108] A round-bottom flask is charged with palladium on carbon (467 mg, 0.22 mmol, 5 mass %, 50% wet) and the flask is evacuated and backfilled with nitrogen three times. A solution of benzyl (2S)-2-[5-[5-[3-acetamido-4,5-diacetoxy-6-(acetoxymethyl)tetrahydropyran-2-yl]oxypentanoylamino]pentanoylamino]-5-[bis[2-[5-[5-[3-acetamido-4,5-diacetoxy-6-(acetoxymethyl)tetrahydropyran-2-yl]oxypentanoylamino]pentanoylamino]ethyl]amino]-5-oxo-pentanoate (4.19 g, 2.20 mmol) in MeOH (44 mL) is added via syringe followed by three drops of acetic acid. The flask is evacuated and backfilled with 1 atm hydrogen and the mixture is stirred at ambient temperature under 1 atm hydrogen. After 2 hours, the mixture is filtered through diatomaceous earth and the filtrate is concentrated in vacuo to give the title compound (3.99 g, 99+%). ES/MS m/z 909.6 (M+2H)/2.

### Preparation 28

### Benzyl 6-[[(2S)-2-[5-[5-[3-acetamido-4,5-diacetoxy-6-(acetoxymethyl)tetrahydropyran-2-yl]oxypentanoylamino]pentanoylamino]-5-[bis[2-[5-[5-[3-acetamido-4,5-diacetoxy-6-(acetoxymethyl)tetrahydropyran-2-yl]oxypentanoylamino]pentanoylamino]ethyl]amino]-5-oxo-pentanoyl]amino]hexanoate

[chemical structure]

[0109] The title compound is prepared from (2S)-2-[5-[5-[3-acetamido-4,5-diacetoxy-6-(acetoxymethyl)tetrahydropyran-2-yl]oxypentanoylamino]pentanoylamino]-5-[bis[2-[5-[5-[3-acetamido-4,5-diacetoxy-6-(acetoxymethyl)tetrahydropyran-2-yl]oxypentanoylamino]pentanoylamino]ethyl]amino]-5-oxo-pentanoic acid and benzyl 6-aminohexanoate hydrochloride and in a manner essentially analogous to the method of preparation 10. ES/MS m/z 1011.6 (M+2H)/2.

### Preparation 29

### 6-[[(2S)-2-[5-[5-[3-Acetamido-4,5-diacetoxy-6-(acetoxymethyl)tetrahydropyran-2-yl]oxypentanoylamino]pentanoylamino]-5-[bis[2-[5-[5-[3-acetamido-4,5-diacetoxy-6-(acetoxymethyl)tetrahydropyran-2-yl]oxypentanoylamino]pentanoylamino]ethyl]amino]-5-oxo-pentanoyl]amino]hexanoic acid

[chemical structure]

[0110] A round-bottom flask is charged with palladium on carbon (24 mg, 0.01 mmol, 5% by mass, 50% wet) and the flask is evacuated and backfilled with nitrogen. A solution of benzyl 6-[[(2S)-2-[5-[5-[3-acetamido-4,5-diacetoxy-6-(acetoxymethyl)tetrahydropyran-2-yl]oxypentanoylamino]pentanoylamino]-5-[bis[2-[5-[5-[3-acetamido-4,5-diacetoxy-6-(acetoxymethyl)tetrahydropyran-2-yl]oxypentanoylamino]pentanoylamino]ethyl]amino]-5-oxo-pentanoyl]amino]hexanoate (222 mg, 0.11 mmol) in MeOH (2.2 mL) is added via syringe followed by three drops of acetic acid. The flask is evacuated and backfilled with 1 atm hydrogen and the mixture is stirred under 1 atm hydrogen at ambient temperature. After 5 hours, the flask is purged with nitrogen and the mixture is filtered through diatomaceous earth. The filtrate is concentrated in vacuo to give the title compound (180 mg, 85%). ES/MS m/z 966.2 (M+2H)/2.

### Preparation 30

### (2,5-Dioxopyrrolidin-1-yl) 6-[[(2S)-2-[5-[5-[3-acetamido-4,5-diacetoxy-6-(acetoxymethyl)tetrahydropyran-2-yl]oxypentanoylamino]pentanoylamino]-5-[bis[2-[5-[5-[3-acetamido-4,5-diacetoxy-6-(acetoxymethyl)tetrahydropyran-2-yl]oxypentanoylamino]pentanoylamino]ethyl]amino]-5-oxo-pentanoyl]amino]hexanoate

[chemical structure]

[0111] The title compound is prepared from 6-[[(2S)-2-[5-[5-[3-acetamido-4,5-diacetoxy-6-(acetoxymethyl)tetrahydropyran-2-yl]oxypentanoylamino]pentanoylamino]-5-[bis[2-[5-[5-[3-acetamido-4,5-diacetoxy-6-(acetoxymethyl)tetrahydropyran-2-yl]oxypentanoylamino]pentanoylamino]ethyl]amino]-5-oxo-pentanoyl]amino]hexanoic acid in a manner essentially analogous to the method of preparation 16. ES/MS m/z 1014.6 (M+2H)/2.

### Preparation 31

### Benzyl 11-[[(2S)-2-[5-[5-[3-acetamido-4,5-diacetoxy-6-(acetoxymethyl)tetrahydropyran-2-yl]oxypentanoylamino]pentanoylamino]-5-[bis[2-[5-[5-[3-acetamido-4,5-diacetoxy-6-(acetoxymethyl)tetrahydropyran-2-yl]oxypentanoylamino]pentanoylamino]ethyl]amino]-5-oxo-pentanoyl]amino]undecanoate

[chemical structure]

[0112] The title compound is prepared from (2S)-2-[5-[5-[3-acetamido-4,5-diacetoxy-6-(acetoxymethyl)tetrahydropyran-2-yl]oxypentanoylamino]pentanoylamino]-5-[bis[2-[5-[5-[3-acetamido-4,5-diacetoxy-6-(acetoxymethyl)tetrahydropyran-2-yl]oxypentanoylamino]pentanoylamino]ethyl]amino]-5-oxo-pentanoic acid and benzyl 11-aminoudecanoate hydrochloride in a manner essentially analogous to the method of preparation 10. ES/MS m/z 1046.6 (M+2H)/2.

### Preparation 32

### 11-[[(2S)-2-[5-[5-[3-Acetamido-4,5-diacetoxy-6-(acetoxymethyl)tetrahydropyran-2-yl]oxypentanoylamino]pentanoylamino]-5-[bis[2-[5-[5-[3-acetamido-4,5-diacetoxy-6-(acetoxymethyl)tetrahydropyran-2-yl]oxypentanoylamino]pentanoylamino]ethyl]amino]-5-oxo-pentanoyl]amino]undecanoic acid

[chemical structure]

[0113] To a round-bottom flask is added palladium on carbon (35 mg, 0.02 mmol, 5 mass %, 50% wet) and the flask is evacuated and backfilled with nitrogen three times. A solution of benzyl 11-[[(2S)-2-[5-[5-[3-acetamido-4,5-diacetoxy-6-(acetoxymethyl)tetrahydropyran-2-yl]oxypentanoylamino]pentanoylamino]-5-[bis[2-[5-[5-[3-acetamido-4,5-diacetoxy-6-(acetoxymethyl)tetrahydropyran-2-yl]oxypentanoylamino]pentanoylamino]ethyl]amino]-5-oxo-pentanoyl]amino]undecanoate (285 mg, 80% purity, 0.11 mmol) is added via syringe. The vessel is evacuated and backfilled with 1 atm hydrogen and the mixture is then stirred at ambient temperature under 1 atm hydrogen. After stirring for 3 hours, the flask is purged with nitrogen and the mixture is filtered through diatomaceous earth. The filtrate is concentrated to give the title compound (213 mg, 79% purity, 77%). ES/MS m/z 1001.20 (M+2H)/2.

### Preparation 33

### (2,5-Dioxopyrrolidin-1-yl) 11-[[(2S)-2-[5-[5-[3-acetamido-4,5-diacetoxy-6-(acetoxymethyl)tetrahydropyran-2-yl]oxypentanoylamino]pentanoylamino]-5-[bis[2-[5-[5-[3-acetamido-4,5-diacetoxy-6-(acetoxymethyl)tetrahydropyran-2-yl]oxypentanoylamino]pentanoylamino]ethyl]amino]-5-oxo-pentanoyl]amino]undecanoate

[chemical structure]

[0114] The title compound is prepared from 11-[[(2S)-2-[5-[5-[3-acetamido-4,5-diacetoxy-6-(acetoxymethyl)tetrahydropyran-2-yl]oxypentanoylamino]pentanoylamino]-5-[bis[2-[5-[5-[3-acetamido-4,5-diacetoxy-6-(acetoxymethyl)tetrahydropyran-2-yl]oxypentanoylamino]pentanoylamino]ethyl]amino]-5-oxo-pentanoyl]amino]undecanoic acid in a manner essentially analogous to the method of preparation 16. ES/MS m/z 1050 (M+2H)/2

### Preparation 34

### [5-Acetamido-6-[5-[2-[[(4S)-4-[5-[3-acetamido-4,5-diacetoxy-6-(acetoxymethyl)tetrahydropyran-2-yl]oxypentanoylamino]-5-[[6-[[[(1S)-1-[[bis(4-methoxyphenyl)-phenyl-methoxy]methyl]-2-[4-(hydroxymethyl)-1-piperidyl]-2-oxo-ethyl]amino]-6-oxo-hexyl]amino]-5-oxo-pentanoyl]-[2-[5-[3-acetamido-4,5-diacetoxy-6-(acetoxymethyl)tetrahydropyran-2-yl]oxypentanoylamino]ethyl]amino]ethylamino]-5-oxo-pentoxy]-3,4-diacetoxy-tetrahydropyran-2-yl]methyl acetate

[chemical structure]

[0115] The title compound is prepared from 6-[[(2S)-2-[5-[3-acetamido-4,5-diacetoxy-6-(acetoxymethyl)tetrahydropyran-2-yl]oxypentanoylamino]-5-[bis[2-[5-[3-acetamido-4,5-diacetoxy-6-(acetoxymethyl)tetrahydropyran-2-yl]oxypentanoylamino]ethyl]amino]-5-oxo-pentanoyl]amino]hexanoic acid and (2S)-2-amino-3-[bis(4-methoxyphenyl)-phenyl-methoxy]-1-[4-(hydroxymethyl)-1-piperidyl]propan-1-one in a manner essentially analogous to the method of preparation 10. ES/MS m/z 1059.2 (M-2H)/2.

### Preparation 35

### 4-[[1-[(2S)-2-[6-[[(2S)-2-[5-[3-Acetamido-4,5-diacetoxy-6-(acetoxymethyl)tetrahydropyran-2-yl]oxypentanoylamino]-5-[bis[2-[5-[3-acetamido-4,5-diacetoxy-6-(acetoxymethyl)tetrahydropyran-2-yl]oxypentanoylamino]ethyl]amino]-5-oxo-pentanoyl]amino]hexanoylamino]-3-[bis(4-methoxyphenyl)-phenyl-methoxy]propanoyl]-4-piperidyl]methoxy]-4-oxo-butanoic acid

[chemical structure]

[0116] To a solution of [5-acetamido-6-[5-[2-[[(4S)-4-[5-[3-acetamido-4,5-diacetoxy-6-(acetoxymethyl)tetrahydropyran-2-yl]oxypentanoylamino]-5-[[6-[[(1S)-1-[[bis(4-methoxyphenyl)-phenyl-methoxy]methyl]-2-[4-(hydroxymethyl)-1-piperidyl]-2-oxo-ethyl]amino]-6-oxo-hexyl]amino]-5-oxo-pentanoyl]-[2-[5-[3-acetamido-4,5-diacetoxy-6-(acetoxymethyl)tetrahydropyran-2-yl]oxypentanoylamino]ethyl]amino]ethylamino]-5-oxo-pentoxy]-3,4-diacetoxy-tetrahydropyran-2-yl]methyl acetate (1.194 g, 0.56 mmol) in DCM (11 mL) is added succinic anhydride (113 mg, 1.13 mmol), TEA (0.4 mL, 3 mmol) and DMAP (213 mg, 1.69 mmol). The mixture is stirred at ambient temperature for 1 hour. After this time, the mixture is diluted with saturated NH₄Cl (200 mL) and extracted with DCM (3×200 mL) and 3:1 CHCl₃:IPA (200 mL). The organic layers are combined, dried over sodium sulfate, filtered, and concentrated in vacuo. The resulting residue is purified by silica gel flash chromatography eluting with 0-40% MeOH/DCM and the resulting product is dried in a vacuum oven at 40° C. for 3 hours to give the title compound (1.081 g, 86%). ES/MS m/z 1109.60 (M-2H)/2.

### Preparation 36

Resin loading

[chemical structure]

[0117] A solution of 4-[[1-[(2S)-2-[6-[[(2S)-2-[5-[3-acetamido-4,5-diacetoxy-6-(acetoxymethyl)tetrahydropyran-2-yl]oxypentanoylamino]-5-[bis[2-[5-[3-acetamido-4,5-diacetoxy-6-(acetoxymethyl)tetrahydropyran-2-yl]oxypentanoylamino]ethyl]amino]-5-oxo-pentanoyl]amino]hexanoylamino]-3-[bis(4-methoxyphenyl)-phenyl-methoxy]propanoyl]-4-piperidyl]methoxy]-4-oxo-butanoic acid (1.00 g, 0.61 mmol) in MeCN (6 mL) and DCM (1 mL) is transferred to a resin loading cartridge. To the vessel are added 2-(1H-benzotriazol-1-yl)-1,1,3,3-tetramethyluronium hexafluorophosphate (386 mg, 0.97 mmol) and DIEA (0.25 mL, 0.48 mmol) and the cartridge is shaken at ambient temperature for 5 minutes. After this time, 1000 Å LCAA controlled-pore glass resin (5.39 g, 90 μmol/g loading, purchased from ChemGenes) is added and the mixture is shaken at ambient temperature for 18 hours. After this time, the cartridge is drained by suction and the resin is washed by shaking with DCM (10 mL) for 10 minutes. The cartridge is drained and the washing and draining procedure is repeated with 10% MeOH/DCM (10 mL) and Et₂O (10 mL). After draining, a solution of acetic anhydride (6.4 mL), pyridine (20 mL) and TEA (0.22 mL) is added and the cartridge is shaken for 2 hours. After this time, the cartridge is drained and the washing and draining procedure above is repeated using DCM (10 mL), 10% MeOH/DCM (10 mL) and diethyl ether (10 mL). After draining, the resin is dried under vacuum for 30 minutes. The resin loading is determined using a standard trityl assay. The resin loading was calculated to be 34.7 μmol/g.

### Preparation 37

### Benzyl 2-[2-[[(2S)-2-[5-[5-[3-acetamido-4,5-diacetoxy-6-(acetoxymethyl)tetrahydropyran-2-yl]oxypentanoylamino]pentanoylamino]-5-[bis[2-[5-[5-[3-acetamido-4,5-diacetoxy-6-(acetoxymethyl)tetrahydropyran-2-yl]oxypentanoylamino]pentanoylamino]ethyl]amino]-5-oxo-pentanoyl]amino]ethoxy]acetate

[chemical structure]

[0118] The title compound is prepared from (2S)-2-[5-[5-[3-Acetamido-4,5-diacetoxy-6-(acetoxymethyl)tetrahydropyran-2-yl]oxypentanoylamino]pentanoylamino]-5-[bis[2-[5-[5-[3-acetamido-4,5-diacetoxy-6-(acetoxymethyl)tetrahydropyran-2-yl]oxypentanoylamino]pentanoylamino]ethyl]amino]-5-oxo-pentanoic acid and benzyl 2-(2-aminoethoxy)acetate hydrochloride in a manner essentially analogous to the method of preparation 10. ES/MS m/z 1005.2 (M+2H/2).

### Preparation 38

### 2-[2-[[(2S)-2-[5-[5-[3-Acetamido-4,5-diacetoxy-6-(acetoxymethyl)tetrahydropyran-2-yl]oxypentanoylamino]pentanoylamino]-5-[bis[2-[5-[5-[3-acetamido-4,5-diacetoxy-6-(acetoxymethyl)tetrahydropyran-2-yl]oxypentanoylamino]pentanoylamino]ethyl]amino]-5-oxo-pentanoylamino]ethoxy]acetic acid

[chemical structure]

[0119] Benzyl 2-[2-[[(2S)-2-[5-[5-[3-acetamido-4,5-diacetoxy-6-(acetoxymethyl)tetrahydropyran-2-yl]oxypentanoylamino]pentanoylamino]-5-[bis[2-[5-[5-[3-acetamido-4,5-diacetoxy-6-(acetoxymethyl)tetrahydropyran-2-yl]oxypentanoylamino]pentanoylamino]ethyl]amino]-5-oxo-pentanoyl]amino]ethoxy]acetate (0.120 mmol, 240 mg) is combined with 5% Pd/C (1.17 mmol, 124 mg) in MeOH (12.0 ml). The mixture is hydrogenated on a Parr shaker (ambient temperature, 10 psi) for 48 minutes, filtered through diatomaceous earth, and concentrated in vacuo to give the title compound as a gray solid (187 mg, 82%). ES/MS m/z 960.0 (M+2H/2).

### Preparation 39

### (2,3,5,6-Tetrafluorophenyl) 2-[2-[[(2S)-2-[5-[5-[3-acetamido-4,5-diacetoxy-6-(acetoxymethyl)tetrahydropyran-2-yl]oxypentanoylamino]pentanoylamino]-5-[bis[2-[5-[5-[3-acetamido-4,5-diacetoxy-6-(acetoxymethyl)tetrahydropyran-2-yl]oxypentanoylamino]pentanoylamino]ethyl]amino]-5-oxo-pentanoyl]amino]ethoxy]acetate

[chemical structure]

[0120] To 2-[2-[[(2S)-2-[5-[5-[3-acetamido-4,5-diacetoxy-6-(acetoxymethyl)tetrahydropyran-2-yl]oxypentanoylamino]pentanoylamino]-5-[bis[2-[5-[5-[3-acetamido-4,5-diacetoxy-6-(acetoxymethyl)tetrahydropyran-2-yl]oxypentanoylamino]pentanoylamino]ethyl]amino]-5-oxo-pentanoyl]amino]ethoxy]acetic acid (0.096 mmol, 184 mg) and DIEA (0.765 mmol, 140 μL) in DCM (3.0 ml) is added (2,3,5,6-tetrafluorophenyl) 2,2,2-trifluoroacetate (0.383 mmol, 100 mg) to the mixture dropwise. The mixture is stirred at ambient temperature for 16 hours. The reaction mixture is purified directly by silica gel flash chromatography eluting with 0% to 50% MeOH/DCM to give the title compound as a tan solid (197 mg, 99%). ES/MS m/z 1034.0 (M+2H/2).

### Preparation 40

### Benzyl 2-[2-[2-[2-[[(2S)-2-[5-[5-[3-acetamido-4,5-diacetoxy-6-(acetoxymethyl)tetrahydropyran-2-yl]oxypentanoylamino]pentanoylamino]-5-[bis[2-[5-[5-[3-acetamido-4,5-diacetoxy-6-(acetoxymethyl)tetrahydropyran-2-yl]oxypentanoylamino]pentanoylamino]ethyl]amino]-5-oxo-pentanoyl]amino]ethoxy]ethoxy]ethoxy]acetate

[chemical structure]

[0121] The title compound is prepared from (2S)-2-[5-[5-[3-acetamido-4,5-diacetoxy-6-(acetoxymethyl)tetrahydropyran-2-yl]oxypentanoylamino]pentanoylamino]-5-[bis[2-[5-[5-[3-acetamido-4,5-diacetoxy-6-(acetoxymethyl)tetrahydropyran-2-yl]oxypentanoylamino]pentanoylamino]ethyl]amino]-5-oxo-pentanoic acid and benzyl 2-[2-[2-(2-aminoethoxy)ethoxy]ethoxy]acetate hydrochloride in a manner essentially analogous to the method of preparation 10. ES/MS m/z 1049.0 (M+2H/2).

### Preparation 41

### 2-[2-[2-[2-[[(2S)-2-[5-[5-[3-Acetamido-4,5-diacetoxy-6-(acetoxymethyl)tetrahydropyran-2-yl]oxypentanoylamino]pentanoylamino]-5-[bis[2-[5-[5-[3-acetamido-4,5-diacetoxy-6-(acetoxymethyl)tetrahydropyran-2-yl]oxypentanoylamino]pentanoylamino]ethyl]amino]-5-oxo-pentanoyl]amino]ethoxy]ethoxy]ethoxy]acetic acid

[chemical structure]

[0122] Benzyl 2-[2-[2-[2-[[(2S)-2-[5-[5-[3-acetamido-4,5-diacetoxy-6-(acetoxymethyl)tetrahydropyran-2-yl]oxypentanoylamino]pentanoylamino]-5-[bis[2-[5-[5-[3-acetamido-4,5-diacetoxy-6-(acetoxymethyl)tetrahydropyran-2-yl]oxypentanoylamino]pentanoylamino]ethyl]amino]-5-oxo-pentanoyl]amino]ethoxy]ethoxy]ethoxy]acetate (0.118 mmol, 247 mg) is combined with 5% Pd/C (1.17 mmol, 124 mg) in MeOH (12.0 mL). The mixture is hydrogenated on a Parr shaker (ambient temperature, 10 psi) for 1 hour, filtered through diatomaceous earth, and concentrated in vacuo to give the title compound as a gray solid (227 mg, 96%). ES/MS m/z 1004.0 (M+2H/2).

### Preparation 42

### (2,3,5,6-Tetrafluorophenyl) 2-[2-[2-[2-[[(2S)-2-[5-[5-[3-acetamido-4,5-diacetoxy-6-(acetoxymethyl)tetrahydropyran-2-yl]oxypentanoylamino]pentanoylamino]-5-[bis[2-[5-[5-[3-acetamido-4,5-diacetoxy-6-(acetoxymethyl)tetrahydropyran-2-yl]oxypentanoylamino]pentanoylamino]ethyl]amino]-5-oxo-pentanoyl]amino]ethoxy]ethoxy]ethoxy]acetate

[chemical structure]

[0123] To 2-[2-[2-[2-[[(2S)-2-[5-[5-[3-Acetamido-4,5-diacetoxy-6-(acetoxymethyl)tetrahydropyran-2-yl]oxypentanoylamino]pentanoylamino]-5-[bis[2-[5-[5-[3-acetamido-4,5-diacetoxy-6-(acetoxymethyl)tetrahydropyran-2-yl]oxypentanoylamino]pentanoylamino]ethyl]amino]-5-oxo-pentanoyl]amino]ethoxy]ethoxy]ethoxy]acetic acid (0.111 mmol, 222 mg) and DIEA (0.883 mmol, 154 μL) in DCM (3.0 ml) is added (2,3,5,6-tetrafluorophenyl) 2,2,2-trifluoroacetate (0.443 mmol, 116 mg) to the mixture dropwise. The mixture is stirred at ambient temperature for 16 hours. The reaction mixture is purified directly by silica gel flash chromatography eluting with 0% to 50% MeOH/DCM to give the title compound as a tan solid (174 mg, 73%). ES/MS m/z 1078.2 (M+2H/2).

### Example 1: Conjugation Protocol

[0124] For the synthesis of GalNAc-conjugated sense strands, a sense strand with a 3′ C6-NH₂ functional group was first synthesized using standard phosphoramidite chemistry. A stock solution of GalNAc ligand-NHS ester (10 mmol/L in acetonitrile; 1 eq) was prepared. Borate buffer (10% v/v; 20×) was added to oligonucleotide C6-NH₂ sense strand in an Eppendorf tube, then GalNAc ligand (5 eq) was added. The mixture was shaken at ambient temperature for 16 hours. After this time, the mixture was transferred to a 15 mL falcon tube, ammonium hydroxide (28 mass %) was added, and the mixture was shaken at ambient temperature for 2 hours. The ammonia was then removed in vacuo. The residue was purified by ion-exchange chromatography. Conditions: Solvent A: 15% MeCN/20 mM NaH₂PO₄, Solvent B: 15% MeCN/20 mM NaH₂PO₄, 1M NaBr; 35-55% B over 5 CV at 8 mL/min, column temperature 60° C. The desired fractions were pooled and desalted by spin-filtration using an Eppendorf centrifuge or desalting column. After desalting, the material was recovered and OD and volume were measured to obtain concentration.

[0125] Alternatively, conjugation to the 5′ position of the sense strand through immobilizing the GalNAc ligand on microporous polystyrene resin or controlled pore glass and synthesized using established solid phase oligonucleotide synthesis methods with 5′-CE β-cyanoethyl) phosphoramidites.

[0126] Alternatively, the GalNAc ligand was converted to a suitable phosphoramidite and delivered to the 5′ position of the sense strand using standard phosphoramidite chemistry.

### Example 2: Annealing

[0127] To generate the siRNA duplexes of a sense and antisense strand, the following procedures were performed. To a falcon tube containing oligonucleotide sense strand-GalNAc conjugate, the corresponding antisense oligonucleotide (1 eq) was added and vortexed for 10 seconds before spin-filtering through 100K MWCO Amicon filter unit to remove particulates. The filtrate was recovered and concentrated in vacuo on a Genevac evaporator. The residue was reconstituted in 1×PBS, filtered through 0.2μ filter, and OD and volume were measured to obtain concentration.

[0128] An endotoxin test was performed using a Limulus amebocyte lysate on an Endosafe®-nexgen PTS instrument.

TABLE 1
Exemplary molecules synthesized utilizing the aforementioned conjugation and
annealing protocols.

| Molecule Identifier | Ligand attached to 3′ of sense strand |
|---|---|
| 1 | [chemical structure] |
| 2 | [chemical structure] |
| 3 | [chemical structure] |
| 4 | [chemical structure] |
| 5 | [chemical structure] |
| 6 | [chemical structure] |

### Example 3

### General procedure for oligo synthesis using GalNAc-functionalized CPG

[0129] Oligo synthesis was conducted on a MerMade™ 12 instrument using phosphoramidite chemistry. Sense strands were synthesized from the prefunctionalized GalNAc solid support and antisense strands were synthesized using standard support preloaded with the first nucleotide of the oligo sequence. Oligos were cleaved and deprotected using concentrated ammonium hydroxide solution (28% by mass) and purified by ion exchange chromatography using conditions described above. Desalting, annealing, and endotoxin testing were conducted.

[0130] The sequence of antisense oligonucleotides were designed using 15 to 50 nucleotides of the following HMGCR transcript (SEQ ID NO: 1), where T nucleotides were replaced by U nucleotides, and where one or more nucleotides and one or more internucleotide linkages were optionally further modified as described herein.

Homo sapiens HMGCR Cell Death Receptor (HMGCR) transcript,
SEQ ID NO: 1
ccttccgctc cgcgactgcg ttaactggag ccaggctgag cgtcggcgcc ggggttcggt
ggcctctagt gagatctgga ggatccaagg attctgtagc tacaatgttg tcaagacttt
ttcgaatgca tggcctcttt gtggcctccc atccctggga agtcatagtg gggacagtga
cactgaccat ctgcatgatg tccatgaaca tgtttactgg taacaataag atctgtggtt
ggaattatga atgtccaaag tttgaagagg atgttttgag cagtgacatt ataattctga
caataacacg atgcatagcc atcctgtata tttacttcca gttccagaat ttacgtcaac
ttggatcaaa atatattttg ggtattgctg gccttttcac aattttctca agttttgtat
tcagtacagt tgtcattcac ttcttagaca aagaattgac aggcttgaat gaagctttgc
cctttttcct acttttgatt gacctttcca gagcaagcac attagcaaag tttgccctca
gttccaactc acaggatgaa gtaagggaaa atattgctcg tggaatggca attttaggtc
ctacgtttac cctcgatgct cttgttgaat gtcttgtgat tggagttggt accatgtcag
gggtacgtca gcttgaaatt atgtgctgct ttggctgcat gtcagttctt gccaactact
tcgtgttcat gactttcttc ccagcttgtg tgtccttggt attagagctt tctcgggaaa
gccgcgaggg tcgtccaatt tggcagctca gccattttgc ccgagtttta gaagaagaag
aaaataagcc gaatcctgta actcagaggg tcaagatgat tatgtctcta ggcttggttc
ttgttcatgc tcacagtcgc tggatagctg atccttctcc tcaaaacagt acagcagata
cttctaaggt ttcattagga ctggatgaaa atgtgtccaa gagaattgaa ccaagtgttt
ccctctggca gttttatctc tctaaaatga tcagcatgga tattgaacaa gttattaccc
taagtttagc tctccttctg gctgtcaagt acatcttctt tgaacaaaca gagacagaat
ctacactctc attaaaaaac cctatcacat ctcctgtagt gacacaaaag aaagtcccag
acaattgttg tagacgtgaa cctatgctgg tcagaaataa ccagaaatgt gattcagtag
aggaagagac agggataaac cgagaaagaa aagttgaggt tataaaaccc ttagtggctg
aaacagatac cccaaacaga gctacatttg tggttggtaa ctcctcctta ctcgatactt
catcagtact ggtgacacag gaacctgaaa ttgaacttcc cagggaacct cggcctaatg
aagaatgtct acagatactt gggaatgcag agaaaggtgc aaaattcctt agtgatgctg
agatcatcca gttagtcaat gctaagcata tcccagccta caagttggaa actctgatgg
aaactcatga gcgtggtgta tctattcgcc gacagttact ttccaagaag ctttcagaac
cttcttctct ccagtaccta ccttacaggg attataatta ctccttggtg atgggagctt
gttgtgagaa tgttattgga tatatgccca tccctgttgg agtggcagga cccctttgct
tagatgaaaa agaatttcag gttccaatgg caacaacaga aggttgtctt gtggccagca
ccaatagagg ctgcagagca ataggtcttg gtggaggtgc cagcagccga gtccttgcag
atgggatgac tcgtggccca gttgtgcgtc ttccacgtgc ttgtgactct gcagaagtga
aagcctggct cgaaacatct gaagggttcg cagtgataaa ggaggcattt gacagcacta
gcagatttgc acgtctacag aaacttcata caagtatagc tggacgcaac ctttatatcc
gtttccagtc caggtcaggg gatgccatgg ggatgaacat gatttcaaag ggtacagaga
aagcactttc aaaacttcac gagtatttcc ctgaaatgca gattctagcc gttagtggta
actattgtac tgacaagaaa cctgctgcta taaattggat agagggaaga ggaaaatctg
ttgtttgtga agctgtcatt ccagccaagg ttgtcagaga agtattaaag actaccacag
aggctatgat tgaggtcaac attaacaaga atttagtggg ctctgccatg gctgggagca
taggaggcta caacgcccat gcagcaaaca ttgtcaccgc catctacatt gcctgtggac
aggatgcagc acagaatgtt ggtagttcaa actgtattac tttaatggaa gcaagtggtc
ccacaaatga agatttatat atcagctgca ccatgccatc tatagagata ggaacggtgg
gtggtgggac caacctacta cctcagcaag cctgtttgca gatgctaggt gttcaaggag
catgcaaaga taatcctggg gaaaatgccc ggcagcttgc ccgaattgtg tgtgggaccg
taatggctgg ggaattgtca cttatggcag cattggcagc aggacatctt gtcaaaagtc
acatgattca caacaggtcg aagatcaatt tacaagacct ccaaggagct tgcaccaaga
agacagcctg aatagcccga cagttctgaa ctggaacatg ggcattgggt tctaaaggac
taacataaaa tctgtgaatt aaaaaagctc aatgcattgt cttgtggagg atgaatagat
gtgatcactg agacagccac ttggtttttg gctctttcag agaggtctca ggttctttcc
atgcagactc ctcagatctg aacacagttt agtgctttac atgctgtgct ctttgaagag
atttcaacaa gaatattgta tgttaaagca tcagagatgg taatctacag ctcacctctg
aaggcaaata taagctggga aaaaagtttt gatgaaattc ttgaagttca tggtgatcag
tgcaattgac cttctccctc actcctgcca gttgaaaatg gatttttaaa ttatactgta
gctgatgaaa ctcctgattt tgtagttaat ttattaagtc tgggatgtag aacttcaaga
agtaagagct aagttctaag ttcatgtttg taaattaata cttcatttgg tgctggtcta
ttttgatttt ggggggtaat cagcattatt cttcagaagg ggacctgttt tcttcaaggg
aagaaacact cttattccca aactacagaa taatgtgtta aacatgctaa atagttctat
caggaaaaca aatcactgta tttatctccg caggctattt gttcagagag gccttttgtt
taaatataaa tgtttaaata taaatgtttg tctggattgg ctataacatg tctttcagca
ttaggctttt aagaaacaca gggttttgta ttctttacta aagatatcag agctcttaat
gttgcttaga tgagggtgac tgtcaagtac aagcaagact gggaccttag aaatcattgt
agaaacacag ttttgaaaga aaaataccat gtctctaagc caactttaat tgcttaaaag
acatttttat ttagttgaaa aatctagttt tttttgtaaa ctgtatcaaa tctgtatatg
ttgtaataaa acttatgcta gtttattgga agtgttcaag aaataaaaat caacttgtgt
actgataaaa tactctagcc tgggccagag aagataatgt tctttaatgt tgtccaggaa
accctggctt gcttgccgag cctaatgaaa gggaaagtca gctttcagag ccagtgaagg
agccacgtga atggccctag aactgtgcct agttcctgtg gccaggaggt tggtgactga
aacattcaca cagggctctt tgatggaccc acgaacgctc ttagctttct cagggggtca
gcagagttat tgaatcttaa ttttttttaa tgtacaagtt ttgtataaat aataaagaac
tccttatttt gtattacatc taatgcttca agtgttgctc ttggaaagct gatgatgtct
cttgtagaag atggactctg aaaaacattc caggaaacca tggcagcatg gagagcctct
tagtgattgt gtctgcattg ttattgtgga agatttacct tttctgttgt acgtaaagct
taaattgctt ttgttgtgac tttttagcca gtgacttttt ctgagctttt catggaagtg
gcagtgaaaa atatgttgag tgttcatttt agtgactgta attaatatct tgctggatta
atgttttgta caattactaa attgtataca ttttgttata gaatactttt ttctagtttc
agtaaataat gaaaaggaag ttaataccaa

[0131] Exemplary antisense strand sequences of 18 nucleotides in length are shown in Table 2 below, which may be optionally further modified and synthesized and incorporated into the RNAi agents, as described herein.

TABLE 2
Antisense 18 mers of HMGCR RNAi agents

| SEQ ID: | Antisense 18 Mer |
|---|---|
| SEQ ID: 2 | AGUCUUGACAACAUUGUA |
| SEQ ID: 3 | AAGUCUUGACAACAUUGU |
| SEQ ID: 4 | AACAUGUUCAUGGACAUC |
| SEQ ID: 5 | CUGGAACUGGAAGUAAAU |
| SEQ ID: 6 | UUCUGGAACUGGAAGUAA |
| SEQ ID: 7 | AAAAAGGGCAAAGCUUCA |
| SEQ ID: 8 | GGGCAAACUUUGCUAAUG |
| SEQ ID: 9 | AGGGCAAACUUUGCUAAU |
| SEQ ID: 10 | GAGGGCAAACUUUGCUAA |
| SEQ ID: 11 | ACUGAGGGCAAACUUUGC |
| SEQ ID: 12 | GAACUGAGGGCAAACUUU |
| SEQ ID: 13 | CCUUACUUCAUCCUGUGA |
| SEQ ID: 14 | UUCCCUUACUUCAUCCUG |
| SEQ ID: 15 | UUUUCCCUUACUUCAUCC |
| SEQ ID: 16 | AUUUUCCCUUACUUCAUC |
| SEQ ID: 17 | CCAAAUUGGACGACCCUC |
| SEQ ID: 18 | GCCAAAUUGGACGACCCU |
| SEQ ID: 19 | UGCCAAAUUGGACGACCC |
| SEQ ID: 20 | GAGCUGCCAAAUUGGACG |
| SEQ ID: 21 | UGAGCUGCCAAAUUGGAC |
| SEQ ID: 22 | CUGAGCUGCCAAAUUGGA |
| SEQ ID: 23 | GGCUGAGCUGCCAAAUUG |
| SEQ ID: 24 | AAUGGCUGAGCUGCCAAA |
| SEQ ID: 25 | CAAAAUGGCUGAGCUGCC |
| SEQ ID: 26 | GCAAAAUGGCUGAGCUGC |
| SEQ ID: 27 | CUUCUUCUUCUAAAACUC |
| SEQ ID: 28 | CAUAAUCAUCUUGACCCU |
| SEQ ID: 29 | AGACAUAAUCAUCUUGAC |
| SEQ ID: 30 | GGAUCAGCUAUCCAGCGA |
| SEQ ID: 31 | AGGAUCAGCUAUCCAGCG |
| SEQ ID: 32 | AAGGAUCAGCUAUCCAGC |
| SEQ ID: 33 | GUUUUAUAACCUCAACUU |
| SEQ ID: 34 | GGUUUUAUAACCUCAACU |
| SEQ ID: 35 | CAGGGAUGGGCAUAUAUC |
| SEQ ID: 36 | ACAGGGAUGGGCAUAUAU |
| SEQ ID: 37 | CAACAGGGAUGGGCAUAU |
| SEQ ID: 38 | CCAACAGGGAUGGGCAUA |
| SEQ ID: 39 | UCCAACAGGGAUGGGCAU |
| SEQ ID: 40 | CUCCAACAGGGAUGGGCA |
| SEQ ID: 41 | CGGCUGCUGGCACCUCCA |
| SEQ ID: 42 | GUCAUCCCAUCUGCAAGG |
| SEQ ID: 43 | AGUCAUCCCAUCUGCAAG |
| SEQ ID: 44 | CGAGUCAUCCCAUCUGCA |
| SEQ ID: 45 | ACAAGCACGUGGAAGACG |
| SEQ ID: 46 | CACAAGCACGUGGAAGAC |
| SEQ ID: 47 | GUCACAAGCACGUGGAAG |
| SEQ ID: 48 | UGCAGAGUCACAAGCACG |
| SEQ ID: 49 | CUUCUGCAGAGUCACAAG |
| SEQ ID: 50 | GGACUGGAAACGGAUAUA |
| SEQ ID: 51 | UGGACUGGAAACGGAUAU |
| SEQ ID: 52 | CCUGGACUGGAAACGGAU |
| SEQ ID: 53 | UAUGCUCCCAGCCAUGGC |
| SEQ ID: 54 | CUAUGCUCCCAGCCAUGG |
| SEQ ID: 55 | CCUAUGCUCCCAGCCAUG |
| SEQ ID: 56 | CAUUCUGUGCUGCAUCCU |
| SEQ ID: 57 | AGUAAUACAGUUUGAACU |
| SEQ ID: 58 | UAAAGUAAUACAGUUUGA |
| SEQ ID: 59 | UUAAAGUAAUACAGUUUG |
| SEQ ID: 60 | AUUAAAGUAAUACAGUUU |
| SEQ ID: 61 | UCCAUUAAAGUAAUACAG |
| SEQ ID: 62 | UUCCAUUAAAGUAAUACA |
| SEQ ID: 63 | CUUCCAUUAAAGUAAUAC |
| SEQ ID: 64 | GCUUCCAUUAAAGUAAUA |
| SEQ ID: 65 | AUGGUGCAGCUGAUAUAU |
| SEQ ID: 66 | CAUGGUGCAGCUGAUAUA |
| SEQ ID: 67 | GCAUGGUGCAGCUGAUAU |
| SEQ ID: 68 | GGCAUGGUGCAGCUGAUA |
| SEQ ID: 69 | UGGCAUGGUGCAGCUGAU |
| SEQ ID: 70 | GAUGGCAUGGUGCAGCUG |
| SEQ ID: 71 | GAACACCUAGCAUCUGCA |
| SEQ ID: 72 | UUGAACACCUAGCAUCUG |
| SEQ ID: 73 | CUUGAACACCUAGCAUCU |
| SEQ ID: 74 | CCUUGAACACCUAGCAUC |
| SEQ ID: 75 | UCCUUGAACACCUAGCAU |
| SEQ ID: 76 | AUGCUCCUUGAACACCUA |
| SEQ ID: 77 | GCAUGCUCCUUGAACACC |
| SEQ ID: 78 | UGCAUGCUCCUUGAACAC |
| SEQ ID: 79 | UUGCAUGCUCCUUGAACA |
| SEQ ID: 80 | CUUUGCAUGCUCCUUGAA |
| SEQ ID: 81 | UCUUUGCAUGCUCCUUGA |
| SEQ ID: 82 | AAUUCGGGCAAGCUGCCG |
| SEQ ID: 83 | ACAAUUCGGGCAAGCUGC |
| SEQ ID: 84 | AAGAUGUCCUGCUGCCAA |
| SEQ ID: 85 | CAAGAUGUCCUGCUGCCA |
| SEQ ID: 86 | GACAAGAUGUCCUGCUGC |
| SEQ ID: 87 | AAGGCCUCUCUGAACAAA |
| SEQ ID: 88 | AGCUCUGAUAUCUUUAGU |
| SEQ ID: 89 | UUACAACAUAUACAGAUU |
| SEQ ID: 90 | AUUACAACAUAUACAGAU |
| SEQ ID: 91 | CUAGAGUAUUUUAUCAGU |
| SEQ ID: 92 | AGCCAGGGUUUCCUGGAC |
| SEQ ID: 93 | GCAAGCCAGGGUUUCCUG |
| SEQ ID: 94 | UCAGAGUCCAUCUUCUAC |
| SEQ ID: 95 | UUCAGAGUCCAUCUUCUA |
| SEQ ID: 96 | AGUAAUUGUACAAAACAU |
| SEQ ID: 97 | AUUCUAUAACAAAAUGUA |
| SEQ ID: 98 | GUAUUCUAUAACAAAAUG |
| SEQ ID: 99 | AGUAUUCUAUAACAAAAU |
| SEQ ID: 100 | AAAAAGUCUUGACAACAU |
| SEQ ID: 101 | GAAAAAGUCUUGACAACA |
| SEQ ID: 102 | CGAAAAAGUCUUGACAAC |
| SEQ ID: 103 | GUUCAUGGACAUCAUGCA |
| SEQ ID: 104 | UGUUCAUGGACAUCAUGC |
| SEQ ID: 105 | AAUUCCAACCACAGAUCU |
| SEQ ID: 106 | UAAUUCCAACCACAGAUC |
| SEQ ID: 107 | AUAAUUCCAACCACAGAU |
| SEQ ID: 108 | GAACUGGAAGUAAAUAUA |
| SEQ ID: 109 | GGAACUGGAAGUAAAUAU |
| SEQ ID: 110 | UGGAACUGGAAGUAAAUA |
| SEQ ID: 111 | AUUCUGGAACUGGAAGUA |
| SEQ ID: 112 | GGCCAGCAAUACCCAAAA |
| SEQ ID: 113 | AAUGACAACUGUACUGAA |
| SEQ ID: 114 | GAAUGACAACUGUACUGA |
| SEQ ID: 115 | AGCCUGUCAAUUCUUUGU |
| SEQ ID: 116 | AAGCCUGUCAAUUCUUUG |
| SEQ ID: 117 | GGGCAAAGCUUCAUUCAA |
| SEQ ID: 118 | AGGGCAAAGCUUCAUUCA |
| SEQ ID: 119 | AAGGGCAAAGCUUCAUUC |
| SEQ ID: 120 | GAAAAAGGGCAAAGCUUC |
| SEQ ID: 121 | GGAACUGAGGGCAAACUU |
| SEQ ID: 122 | UUGGAACUGAGGGCAAAC |
| SEQ ID: 123 | UUACUUCAUCCUGUGAGU |
| SEQ ID: 124 | CUUACUUCAUCCUGUGAG |
| SEQ ID: 125 | GCAAUAUUUUCCCUUACU |
| SEQ ID: 126 | AGCAAUAUUUUCCCUUAC |
| SEQ ID: 127 | CGAGCAAUAUUUUCCCUU |
| SEQ ID: 128 | CACGAGCAAUAUUUUCCC |
| SEQ ID: 129 | CCACGAGCAAUAUUUUCC |
| SEQ ID: 130 | UCCACGAGCAAUAUUUUC |
| SEQ ID: 131 | UUCCACGAGCAAUAUUUU |
| SEQ ID: 132 | CCAUUCCACGAGCAAUAU |
| SEQ ID: 133 | GCCAUUCCACGAGCAAUA |
| SEQ ID: 134 | UGCCAUUCCACGAGCAAU |
| SEQ ID: 135 | UUGCCAUUCCACGAGCAA |
| SEQ ID: 136 | AUUGCCAUUCCACGAGCA |
| SEQ ID: 137 | AAUUGCCAUUCCACGAGC |
| SEQ ID: 138 | UCCAAUCACAAGACAUUC |
| SEQ ID: 139 | CUCCAAUCACAAGACAUU |
| SEQ ID: 140 | UACCAACUCCAAUCACAA |
| SEQ ID: 141 | GUACCAACUCCAAUCACA |
| SEQ ID: 142 | GGUACCAACUCCAAUCAC |
| SEQ ID: 143 | AUGGUACCAACUCCAAUC |
| SEQ ID: 144 | ACAUGGUACCAACUCCAA |
| SEQ ID: 145 | GACAUGGUACCAACUCCA |
| SEQ ID: 146 | CUGACAUGGUACCAACUC |
| SEQ ID: 147 | CCUGACAUGGUACCAACU |
| SEQ ID: 148 | UGCAGCCAAAGCAGCACA |
| SEQ ID: 149 | GAACACGAAGUAGUUGGC |
| SEQ ID: 150 | UGAACACGAAGUAGUUGG |
| SEQ ID: 151 | AUGAACACGAAGUAGUUG |
| SEQ ID: 152 | CAUGAACACGAAGUAGUU |
| SEQ ID: 153 | GUCAUGAACACGAAGUAG |
| SEQ ID: 154 | UUUCCCGAGAAAGCUCUA |
| SEQ ID: 155 | CUUUCCCGAGAAAGCUCU |
| SEQ ID: 156 | GCUUUCCCGAGAAAGCUC |
| SEQ ID: 157 | CGGCUUUCCCGAGAAAGC |
| SEQ ID: 158 | ACGACCCUCGCGGCUUUC |
| SEQ ID: 159 | GACGACCCUCGCGGCUUU |
| SEQ ID: 160 | GGACGACCCUCGCGGCUU |
| SEQ ID: 161 | UGGACGACCCUCGCGGCU |
| SEQ ID: 162 | UUGGACGACCCUCGCGGC |
| SEQ ID: 163 | AUUGGACGACCCUCGCGG |
| SEQ ID: 164 | AAUUGGACGACCCUCGCG |
| SEQ ID: 165 | AAAUUGGACGACCCUCGC |
| SEQ ID: 166 | CAAAUUGGACGACCCUCG |
| SEQ ID: 167 | UUCUUCUUCUAAAACUCG |
| SEQ ID: 168 | AAUCAUCUUGACCCUCUG |
| SEQ ID: 169 | GAGACAUAAUCAUCUUGA |
| SEQ ID: 170 | AGAGACAUAAUCAUCUUG |
| SEQ ID: 171 | CUAGAGACAUAAUCAUCU |
| SEQ ID: 172 | CCUAGAGACAUAAUCAUC |
| SEQ ID: 173 | GCCUAGAGACAUAAUCAU |
| SEQ ID: 174 | AGCCUAGAGACAUAAUCA |
| SEQ ID: 175 | AAGCCUAGAGACAUAAUC |
| SEQ ID: 176 | CAAGCCUAGAGACAUAAU |
| SEQ ID: 177 | UAUCCAGCGACUGUGAGC |
| SEQ ID: 178 | CUAUCCAGCGACUGUGAG |
| SEQ ID: 179 | GCUAUCCAGCGACUGUGA |
| SEQ ID: 180 | AGCUAUCCAGCGACUGUG |
| SEQ ID: 181 | CAGCUAUCCAGCGACUGU |
| SEQ ID: 182 | UCAGCUAUCCAGCGACUG |
| SEQ ID: 183 | GGAAACACUUGGUUCAAU |
| SEQ ID: 184 | CAGAGGGAAACACUUGGU |
| SEQ ID: 185 | AAUAUCCAUGCUGAUCAU |
| SEQ ID: 186 | UCAAUAUCCAUGCUGAUC |
| SEQ ID: 187 | ACUUGACAGCCAGAAGGA |
| SEQ ID: 188 | UACUUGACAGCCAGAAGG |
| SEQ ID: 189 | GUGUAGAUUCUGUCUCUG |
| SEQ ID: 190 | AGUGUAGAUUCUGUCUCU |
| SEQ ID: 191 | AGGUUCACGUCUACAACA |
| SEQ ID: 192 | GGGUUUUAUAACCUCAAC |
| SEQ ID: 193 | AAGGGUUUUAUAACCUCA |
| SEQ ID: 194 | UAAGGGUUUUAUAACCUC |
| SEQ ID: 195 | CUAAGGGUUUUAUAACCU |
| SEQ ID: 196 | AAUUUUGCACCUUUCUCU |
| SEQ ID: 197 | GAAUUUUGCACCUUUCUC |
| SEQ ID: 198 | GGAAUUUUGCACCUUUCU |
| SEQ ID: 199 | AGGAAUUUUGCACCUUUC |
| SEQ ID: 200 | AAGGAAUUUUGCACCUUU |
| SEQ ID: 201 | UAAGGAAUUUUGCACCUU |
| SEQ ID: 202 | CUAAGGAAUUUUGCACCU |
| SEQ ID: 203 | ACUAAGGAAUUUUGCACC |
| SEQ ID: 204 | CACUAAGGAAUUUUGCAC |
| SEQ ID: 205 | CAUCACUAAGGAAUUUUG |
| SEQ ID: 206 | GCAUCACUAAGGAAUUUU |
| SEQ ID: 207 | CUCAGCAUCACUAAGGAA |
| SEQ ID: 208 | GAUCUCAGCAUCACUAAG |
| SEQ ID: 209 | UGAUCUCAGCAUCACUAA |
| SEQ ID: 210 | GACUAACUGGAUGAUCUC |
| SEQ ID: 211 | UGACUAACUGGAUGAUCU |
| SEQ ID: 212 | UUGACUAACUGGAUGAUC |
| SEQ ID: 213 | GCAUUGACUAACUGGAUG |
| SEQ ID: 214 | GGGAUAUGCUUAGCAUUG |
| SEQ ID: 215 | GUAGGCUGGGAUAUGCUU |
| SEQ ID: 216 | UUGUAGGCUGGGAUAUGC |
| SEQ ID: 217 | AGUUUCCAUCAGAGUUUC |
| SEQ ID: 218 | GAGUUUCCAUCAGAGUUU |
| SEQ ID: 219 | UGAGUUUCCAUCAGAGUU |
| SEQ ID: 220 | AUGAGUUUCCAUCAGAGU |
| SEQ ID: 221 | CACGCUCAUGAGUUUCCA |
| SEQ ID: 222 | CCACGCUCAUGAGUUUCC |
| SEQ ID: 223 | ACCACGCUCAUGAGUUUC |
| SEQ ID: 224 | CACCACGCUCAUGAGUUU |
| SEQ ID: 225 | ACACCACGCUCAUGAGUU |
| SEQ ID: 226 | GCGAAUAGAUACACCACG |
| SEQ ID: 227 | AUUAUAAUCCCUGUAAGG |
| SEQ ID: 228 | AAUUAUAAUCCCUGUAAG |
| SEQ ID: 229 | CAAGGAGUAAUUAUAAUC |
| SEQ ID: 230 | CCAAGGAGUAAUUAUAAU |
| SEQ ID: 231 | ACCAAGGAGUAAUUAUAA |
| SEQ ID: 232 | CACCAAGGAGUAAUUAUA |
| SEQ ID: 233 | CCCAUCACCAAGGAGUAA |
| SEQ ID: 234 | UCCCAUCACCAAGGAGUA |
| SEQ ID: 235 | ACAAGCUCCCAUCACCAA |
| SEQ ID: 236 | ACAACAAGCUCCCAUCAC |
| SEQ ID: 237 | GGAUGGGCAUAUAUCCAA |
| SEQ ID: 238 | GGGAUGGGCAUAUAUCCA |
| SEQ ID: 239 | GGCCACAAGACAACCUUC |
| SEQ ID: 240 | UGCUGGCCACAAGACAAC |
| SEQ ID: 241 | UGGUGCUGGCCACAAGAC |
| SEQ ID: 242 | UUGGUGCUGGCCACAAGA |
| SEQ ID: 243 | UGGCACCUCCACCAAGAC |
| SEQ ID: 244 | CUGGCACCUCCACCAAGA |
| SEQ ID: 245 | UCGGCUGCUGGCACCUCC |
| SEQ ID: 246 | AAGGACUCGGCUGCUGGC |
| SEQ ID: 247 | CUGCAAGGACUCGGCUGC |
| SEQ ID: 248 | UCUGCAAGGACUCGGCUG |
| SEQ ID: 249 | AUCUGCAAGGACUCGGCU |
| SEQ ID: 250 | CAUCUGCAAGGACUCGGC |
| SEQ ID: 251 | CCCAUCUGCAAGGACUCG |
| SEQ ID: 252 | AUCCCAUCUGCAAGGACU |
| SEQ ID: 253 | ACGAGUCAUCCCAUCUGC |
| SEQ ID: 254 | CACGAGUCAUCCCAUCUG |
| SEQ ID: 255 | CCACGAGUCAUCCCAUCU |
| SEQ ID: 256 | GCCACGAGUCAUCCCAUC |
| SEQ ID: 257 | GGCCACGAGUCAUCCCAU |
| SEQ ID: 258 | GGGCCACGAGUCAUCCCA |
| SEQ ID: 259 | UGGGCCACGAGUCAUCCC |
| SEQ ID: 260 | CUGGGCCACGAGUCAUCC |
| SEQ ID: 261 | ACUGGGCCACGAGUCAUC |
| SEQ ID: 262 | AAGACGCACAACUGGGCC |
| SEQ ID: 263 | GAAGACGCACAACUGGGC |
| SEQ ID: 264 | UGGAAGACGCACAACUGG |
| SEQ ID: 265 | GUGGAAGACGCACAACUG |
| SEQ ID: 266 | CGUGGAAGACGCACAACU |
| SEQ ID: 267 | ACGUGGAAGACGCACAAC |
| SEQ ID: 268 | CACGUGGAAGACGCACAA |
| SEQ ID: 269 | UCACUUCUGCAGAGUCAC |
| SEQ ID: 270 | UAUCACUGCGAACCCUUC |
| SEQ ID: 271 | UUAUCACUGCGAACCCUU |
| SEQ ID: 272 | UUUAUCACUGCGAACCCU |
| SEQ ID: 273 | CCUUUAUCACUGCGAACC |
| SEQ ID: 274 | UCCUUUAUCACUGCGAAC |
| SEQ ID: 275 | GCCUCCUUUAUCACUGCG |
| SEQ ID: 276 | AAAUGCCUCCUUUAUCAC |
| SEQ ID: 277 | UAGACGUGCAAAUCUGCU |
| SEQ ID: 278 | GUAGACGUGCAAAUCUGC |
| SEQ ID: 279 | UGUAGACGUGCAAAUCUG |
| SEQ ID: 280 | CUGUAGACGUGCAAAUCU |
| SEQ ID: 281 | UCUGUAGACGUGCAAAUC |
| SEQ ID: 282 | UUUCUGUAGACGUGCAAA |
| SEQ ID: 283 | GUUUCUGUAGACGUGCAA |
| SEQ ID: 284 | GAUAUAAAGGUUGCGUCC |
| SEQ ID: 285 | GGAUAUAAAGGUUGCGUC |
| SEQ ID: 286 | CGGAUAUAAAGGUUGCGU |
| SEQ ID: 287 | ACGGAUAUAAAGGUUGCG |
| SEQ ID: 288 | AAACGGAUAUAAAGGUUG |
| SEQ ID: 289 | GAAACGGAUAUAAAGGUU |
| SEQ ID: 290 | GGAAACGGAUAUAAAGGU |
| SEQ ID: 291 | ACUGGAAACGGAUAUAAA |
| SEQ ID: 292 | GACUGGAAACGGAUAUAA |
| SEQ ID: 293 | ACCUGGACUGGAAACGGA |
| SEQ ID: 294 | AAUGACAGCUUCACAAAC |
| SEQ ID: 295 | UGGAAUGACAGCUUCACA |
| SEQ ID: 296 | CUGGAAUGACAGCUUCAC |
| SEQ ID: 297 | UUGGCUGGAAUGACAGCU |
| SEQ ID: 298 | ACCUUGGCUGGAAUGACA |
| SEQ ID: 299 | AACCUUGGCUGGAAUGAC |
| SEQ ID: 300 | CAACCUUGGCUGGAAUGA |
| SEQ ID: 301 | ACAACCUUGGCUGGAAUG |
| SEQ ID: 302 | UAGCCUCCUAUGCUCCCA |
| SEQ ID: 303 | GUAGCCUCCUAUGCUCCC |
| SEQ ID: 304 | UUGUAGCCUCCUAUGCUC |
| SEQ ID: 305 | GUUGUAGCCUCCUAUGCU |
| SEQ ID: 306 | GCGUUGUAGCCUCCUAUG |
| SEQ ID: 307 | GGCGUUGUAGCCUCCUAU |
| SEQ ID: 308 | GGGCGUUGUAGCCUCCUA |
| SEQ ID: 309 | UGGGCGUUGUAGCCUCCU |
| SEQ ID: 310 | UGCAUGGGCGUUGUAGCC |
| SEQ ID: 311 | GCUGCAUGGGCGUUGUAG |
| SEQ ID: 312 | UGCUGCAUGGGCGUUGUA |
| SEQ ID: 313 | UUGCUGCAUGGGCGUUGU |
| SEQ ID: 314 | GUUUGCUGCAUGGGCGUU |
| SEQ ID: 315 | UGUUUGCUGCAUGGGCGU |
| SEQ ID: 316 | AUGUUUGCUGCAUGGGCG |
| SEQ ID: 317 | GACAAUGUUUGCUGCAUG |
| SEQ ID: 318 | GUGCUGCAUCCUGUCCAC |
| SEQ ID: 319 | CAACAUUCUGUGCUGCAU |
| SEQ ID: 320 | AAUACAGUUUGAACUACC |
| SEQ ID: 321 | UAAUACAGUUUGAACUAC |
| SEQ ID: 322 | GUAAUACAGUUUGAACUA |
| SEQ ID: 323 | UGCUUCCAUUAAAGUAAU |
| SEQ ID: 324 | UUGCUUCCAUUAAAGUAA |
| SEQ ID: 325 | ACUUGCUUCCAUUAAAGU |
| SEQ ID: 326 | CACUUGCUUCCAUUAAAG |
| SEQ ID: 327 | UAAAUCUUCAUUUGUGGG |
| SEQ ID: 328 | GCAGCUGAUAUAUAAAUC |
| SEQ ID: 329 | AGAUGGCAUGGUGCAGCU |
| SEQ ID: 330 | UAGAUGGCAUGGUGCAGC |
| SEQ ID: 331 | AUAGAUGGCAUGGUGCAG |
| SEQ ID: 332 | UAUAGAUGGCAUGGUGCA |
| SEQ ID: 333 | CUAUAGAUGGCAUGGUGC |
| SEQ ID: 334 | UCUAUAGAUGGCAUGGUG |
| SEQ ID: 335 | CUCUAUAGAUGGCAUGGU |
| SEQ ID: 336 | UCUCUAUAGAUGGCAUGG |
| SEQ ID: 337 | CCUAUCUCUAUAGAUGGC |
| SEQ ID: 338 | CACCGUUCCUAUCUCUAU |
| SEQ ID: 339 | CCACCGUUCCUAUCUCUA |
| SEQ ID: 340 | CCCACCGUUCCUAUCUCU |
| SEQ ID: 341 | ACAGGCUUGCUGAGGUAG |
| SEQ ID: 342 | AACACCUAGCAUCUGCAA |
| SEQ ID: 343 | AUCUUUGCAUGCUCCUUG |
| SEQ ID: 344 | UAUCUUUGCAUGCUCCUU |
| SEQ ID: 345 | UUAUCUUUGCAUGCUCCU |
| SEQ ID: 346 | AUUAUCUUUGCAUGCUCC |
| SEQ ID: 347 | GAUUAUCUUUGCAUGCUC |
| SEQ ID: 348 | GGAUUAUCUUUGCAUGCU |
| SEQ ID: 349 | UUCGGGCAAGCUGCCGGG |
| SEQ ID: 350 | CACAAUUCGGGCAAGCUG |
| SEQ ID: 351 | ACACAAUUCGGGCAAGCU |
| SEQ ID: 352 | CACACAAUUCGGGCAAGC |
| SEQ ID: 353 | GUCCUGCUGCCAAUGCUG |
| SEQ ID: 354 | UGUCCUGCUGCCAAUGCU |
| SEQ ID: 355 | AUGUCCUGCUGCCAAUGC |
| SEQ ID: 356 | UUUGACAAGAUGUCCUGC |
| SEQ ID: 357 | UUUUGACAAGAUGUCCUG |
| SEQ ID: 358 | ACUUUUGACAAGAUGUCC |
| SEQ ID: 359 | GACUUUUGACAAGAUGUC |
| SEQ ID: 360 | UGACUUUUGACAAGAUGU |
| SEQ ID: 361 | AGUUCUACAUCCCAGACU |
| SEQ ID: 362 | GGCCUCUCUGAACAAAUA |
| SEQ ID: 363 | AGGCCUCUCUGAACAAAU |
| SEQ ID: 364 | UAUUUCUUGAACACUUCC |
| SEQ ID: 365 | UUAUUUCUUGAACACUUC |
| SEQ ID: 366 | UAGAGUAUUUUAUCAGUA |
| SEQ ID: 367 | CAAGCAAGCCAGGGUUUC |
| SEQ ID: 368 | UGGCCACAGGAACUAGGC |
| SEQ ID: 369 | AACCUCCUGGCCACAGGA |
| SEQ ID: 370 | CACCAACCUCCUGGCCAC |
| SEQ ID: 371 | UCAGUCACCAACCUCCUG |
| SEQ ID: 372 | AUUAAGAUUCAAUAACUC |
| SEQ ID: 373 | AAUUAAGAUUCAAUAACU |
| SEQ ID: 374 | AAAUUAAGAUUCAAUAAC |
| SEQ ID: 375 | CAAAACUUGUACAUUAAA |
| SEQ ID: 376 | UACAAAACUUGUACAUUA |
| SEQ ID: 377 | UAAGGAGUUCUUUAUUAU |
| SEQ ID: 378 | AUAAGGAGUUCUUUAUUA |
| SEQ ID: 379 | AAUAAGGAGUUCUUUAUU |
| SEQ ID: 380 | AAAUAAGGAGUUCUUUAU |
| SEQ ID: 381 | AAAAUAAGGAGUUCUUUA |
| SEQ ID: 382 | ACACUUGAAGCAUUAGAU |
| SEQ ID: 383 | ACUUCCAUGAAAAGCUCA |
| SEQ ID: 384 | CCACUUCCAUGAAAAGCU |
| SEQ ID: 385 | UGCCACUUCCAUGAAAAG |
| SEQ ID: 386 | UUCACUGCCACUUCCAUG |
| SEQ ID: 387 | GUAAUUGUACAAAACAUU |

TABLE 3
Exemplary full-length sense and antisense strands of HMGCR RNAi agents

| | | | | | Start |
|---|---|---|---|---|---|
| | | | | | Position on |
| | | | | | human HMGCR |
| | SEQ ID | | SEQ ID | | transcript |
| Duplex NO: | ID NO: | Sense Strand 5′ to 3′ | ID NO: | Antisense Strand 5′ to 3′ | NM_000859.3 |
| Duplex | SEQ ID | GCUACAAUGUUGUCAAGACUA | SEQ ID | UAGUCUUGACAACAUUGUAGCUA | 99 |
| NO: 1 | NO: 388 | | NO: 774 | | |
| Duplex | SEQ ID | CUACAAUGUUGUCAAGACUUA | SEQ ID | UAAGUCUUGACAACAUUGUAGCU | 100 |
| NO: 2 | NO: 389 | | NO: 775 | | |
| Duplex | SEQ ID | AUGAUGUCCAUGAACAUGUUA | SEQ ID | UAACAUGUUCAUGGACAUCAUGC | 195 |
| NO: 3 | NO: 390 | | NO: 776 | | |
| Duplex | SEQ ID | AUAUUUACUUCCAGUUCCAGA | SEQ ID | UCUGGAACUGGAAGUAAAUAUAC | 328 |
| NO: 4 | NO: 391 | | NO: 777 | | |
| Duplex | SEQ ID | AUUUACUUCCAGUUCCAGAAA | SEQ ID | UUUCUGGAACUGGAAGUAAAUAU | 330 |
| NO: 5 | NO: 392 | | NO: 778 | | |
| Duplex | SEQ ID | AAUGAAGCUUUGCCCUUUUUA | SEQ ID | UAAAAAGGGCAAAGCUUCAUUCA | 468 |
| NO: 6 | NO: 393 | | NO: 779 | | |
| Duplex | SEQ ID | CACAUUAGCAAAGUUUGCCCA | SEQ ID | UGGGCAAACUUUGCUAAUGUGCU | 518 |
| NO: 7 | NO: 394 | | NO: 780 | | |
| Duplex | SEQ ID | ACAUUAGCAAAGUUUGCCCUA | SEQ ID | UAGGGCAAACUUUGCUAAUGUGC | 519 |
| NO: 8 | NO: 395 | | NO: 781 | | |
| Duplex | SEQ ID | CAUUAGCAAAGUUUGCCCUCA | SEQ ID | UGAGGGCAAACUUUGCUAAUGUG | 520 |
| NO: 9 | NO: 396 | | NO: 782 | | |
| Duplex | SEQ ID | UAGCAAAGUUUGCCCUCAGUA | SEQ ID | UACUGAGGGCAAACUUUGCUAAU | 523 |
| NO: 10 | NO: 397 | | NO: 783 | | |
| Duplex | SEQ ID | GCAAAGUUUGCCCUCAGUUCA | SEQ ID | UGAACUGAGGGCAAACUUUGCUA | 525 |
| NO: 11 | NO: 398 | | NO: 784 | | |
| Duplex | SEQ ID | ACUCACAGGAUGAAGUAAGGA | SEQ ID | UCCUUACUUCAUCCUGUGAGUUG | 547 |
| NO: 12 | NO: 399 | | NO: 785 | | |
| Duplex | SEQ ID | CACAGGAUGAAGUAAGGGAAA | SEQ ID | UUUCCCUUACUUCAUCCUGUGAG | 550 |
| NO: 13 | NO: 400 | | NO: 786 | | |
| Duplex | SEQ ID | CAGGAUGAAGUAAGGGAAAAA | SEQ ID | UUUUUCCCUUACUUCAUCCUGUG | 552 |
| NO: 14 | NO: 401 | | NO: 787 | | |
| Duplex | SEQ ID | AGGAUGAAGUAAGGGAAAAUA | SEQ ID | UAUUUUCCCUUACUUCAUCCUGU | 553 |
| NO: 15 | NO: 402 | | NO: 788 | | |
| Duplex | SEQ ID | GCGAGGGUCGUCCAAUUUGGA | SEQ ID | UCCAAAUUGGACGACCCUCGCGG | 784 |
| NO: 16 | NO: 403 | | NO: 789 | | |
| Duplex | SEQ ID | CGAGGGUCGUCCAAUUUGGCA | SEQ ID | UGCCAAAUUGGACGACCCUCGCG | 785 |
| NO: 17 | NO: 404 | | NO: 790 | | |
| Duplex | SEQ ID | GAGGGUCGUCCAAUUUGGCAA | SEQ ID | UUGCCAAAUUGGACGACCCUCGC | 786 |
| NO: 18 | NO: 405 | | NO: 791 | | |
| Duplex | SEQ ID | GUCGUCCAAUUUGGCAGCUCA | SEQ ID | UGAGCUGCCAAAUUGGACGACCC | 790 |
| NO: 19 | NO: 406 | | NO: 792 | | |
| Duplex | SEQ ID | UCGUCCAAUUUGGCAGCUCAA | SEQ ID | UUGAGCUGCCAAAUUGGACGACC | 791 |
| NO: 20 | NO: 407 | | NO: 793 | | |
| Duplex | SEQ ID | CGUCCAAUUUGGCAGCUCAGA | SEQ ID | UCUGAGCUGCCAAAUUGGACGAC | 792 |
| NO: 21 | NO: 408 | | NO: 794 | | |
| Duplex | SEQ ID | UCCAAUUUGGCAGCUCAGCCA | SEQ ID | UGGCUGAGCUGCCAAAUUGGACG | 794 |
| NO: 22 | NO: 409 | | NO: 795 | | |
| Duplex | SEQ ID | AAUUUGGCAGCUCAGCCAUUA | SEQ ID | UAAUGGCUGAGCUGCCAAAUUGG | 797 |
| NO: 23 | NO: 410 | | NO: 796 | | |
| Duplex | SEQ ID | UUGGCAGCUCAGCCAUUUUGA | SEQ ID | UCAAAAUGGCUGAGCUGCCAAAU | 800 |
| NO: 24 | NO: 411 | | NO: 797 | | |
| Duplex | SEQ ID | UGGCAGCUCAGCCAUUUUGCA | SEQ ID | UGCAAAAUGGCUGAGCUGCCAAA | 801 |
| NO: 25 | NO: 412 | | NO: 798 | | |
| Duplex | SEQ ID | CCGAGUUUUAGAAGAAGAAGA | SEQ ID | UCUUCUUCUUCUAAAACUCGGGC | 821 |
| NO: 26 | NO: 413 | | NO: 799 | | |
| Duplex | SEQ ID | AGAGGGUCAAGAUGAUUAUGA | SEQ ID | UCAUAAUCAUCUUGACCCUCUGA | 865 |
| NO: 27 | NO: 414 | | NO: 800 | | |
| Duplex | SEQ ID | GGGUCAAGAUGAUUAUGUCUA | SEQ ID | UAGACAUAAUCAUCUUGACCCUC | 868 |
| NO: 28 | NO: 415 | | NO: 801 | | |
| Duplex | SEQ ID | AGUCGCUGGAUAGCUGAUCCA | SEQ ID | UGGAUCAGCUAUCCAGCGACUGU | 915 |
| NO: 29 | NO: 416 | | NO: 802 | | |
| Duplex | SEQ ID | GUCGCUGGAUAGCUGAUCCUA | SEQ ID | UAGGAUCAGCUAUCCAGCGACUG | 916 |
| NO: 30 | NO: 417 | | NO: 803 | | |
| Duplex | SEQ ID | UCGCUGGAUAGCUGAUCCUUA | SEQ ID | UAAGGAUCAGCUAUCCAGCGACU | 917 |
| NO: 31 | NO: 418 | | NO: 804 | | |
| Duplex | SEQ ID | AAAAGUUGAGGUUAUAAAACA | SEQ ID | UGUUUUAUAACCUCAACUUUUCU | 1289 |
| NO: 32 | NO: 419 | | NO: 805 | | |
| Duplex | SEQ ID | AAAGUUGAGGUUAUAAAACCA | SEQ ID | UGGUUUUAUAACCUCAACUUUUC | 1290 |
| NO: 33 | NO: 420 | | NO: 806 | | |
| Duplex | SEQ ID | UGGAUAUAUGCCCAUCCCUGA | SEQ ID | UCAGGGAUGGGCAUAUAUCCAAU | 1697 |
| NO: 34 | NO: 421 | | NO: 807 | | |
| Duplex | SEQ ID | GGAUAUAUGCCCAUCCCUGUA | SEQ ID | UACAGGGAUGGGCAUAUAUCCAA | 1698 |
| NO: 35 | NO: 422 | | NO: 808 | | |
| Duplex | SEQ ID | AUAUAUGCCCAUCCCUGUUGA | SEQ ID | UCAACAGGGAUGGGCAUAUAUCC | 1700 |
| NO: 36 | NO: 423 | | NO: 809 | | |
| Duplex | SEQ ID | UAUAUGCCCAUCCCUGUUGGA | SEQ ID | UCCAACAGGGAUGGGCAUAUAUC | 1701 |
| NO: 37 | NO: 424 | | NO: 810 | | |
| Duplex | SEQ ID | AUAUGCCCAUCCCUGUUGGAA | SEQ ID | UUCCAACAGGGAUGGGCAUAUAU | 1702 |
| NO: 38 | NO: 425 | | NO: 811 | | |
| Duplex | SEQ ID | UAUGCCCAUCCCUGUUGGAGA | SEQ ID | UCUCCAACAGGGAUGGGCAUAUA | 1703 |
| NO: 39 | NO: 426 | | NO: 812 | | |
| Duplex | SEQ ID | GGUGGAGGUGCCAGCAGCCGA | SEQ ID | UCGGCUGCUGGCACCUCCACCAA | 1830 |
| NO: 40 | NO: 427 | | NO: 813 | | |
| Duplex | SEQ ID | GUCCUUGCAGAUGGGAUGACA | SEQ ID | UGUCAUCCCAUCUGCAAGGACUC | 1851 |
| NO: 41 | NO: 428 | | NO: 814 | | |
| Duplex | SEQ ID | UCCUUGCAGAUGGGAUGACUA | SEQ ID | UAGUCAUCCCAUCUGCAAGGACU | 1852 |
| NO: 42 | NO: 429 | | NO: 815 | | |
| Duplex | SEQ ID | CUUGCAGAUGGGAUGACUCGA | SEQ ID | UCGAGUCAUCCCAUCUGCAAGGA | 1854 |
| NO: 43 | NO: 430 | | NO: 816 | | |
| Duplex | SEQ ID | UGCGUCUUCCACGUGCUUGUA | SEQ ID | UACAAGCACGUGGAAGACGCACA | 1885 |
| NO: 44 | NO: 431 | | NO: 817 | | |
| Duplex | SEQ ID | GCGUCUUCCACGUGCUUGUGA | SEQ ID | UCACAAGCACGUGGAAGACGCAC | 1886 |
| NO: 45 | NO: 432 | | NO: 818 | | |
| Duplex | SEQ ID | GUCUUCCACGUGCUUGUGACA | SEQ ID | UGUCACAAGCACGUGGAAGACGC | 1888 |
| NO: 46 | NO: 433 | | NO: 819 | | |
| Duplex | SEQ ID | CACGUGCUUGUGACUCUGCAA | SEQ ID | UUGCAGAGUCACAAGCACGUGGA | 1894 |
| NO: 47 | NO: 434 | | NO: 821 | | |
| Duplex | SEQ ID | UGCUUGUGACUCUGCAGAAGA | SEQ ID | UCUUCUGCAGAGUCACAAGCACG | 1898 |
| NO: 48 | NO: 435 | | NO: 821 | | |
| Duplex | SEQ ID | UUUAUAUCCGUUUCCAGUCCA | SEQ ID | UGGACUGGAAACGGAUAUAAAGG | 2032 |
| NO: 49 | NO: 436 | | NO: 822 | | |
| Duplex | SEQ ID | UUAUAUCCGUUUCCAGUCCAA | SEQ ID | UUGGACUGGAAACGGAUAUAAAG | 2033 |
| NO: 50 | NO: 437 | | NO: 823 | | |
| Duplex | SEQ ID | AUAUCCGUUUCCAGUCCAGGA | SEQ ID | UCCUGGACUGGAAACGGAUAUAA | 2035 |
| NO: 51 | NO: 438 | | NO: 824 | | |
| Duplex | SEQ ID | CUGCCAUGGCUGGGAGCAUAA | SEQ ID | UUAUGCUCCCAGCCAUGGCAGAG | 2323 |
| NO: 52 | NO: 439 | | NO: 825 | | |
| Duplex | SEQ ID | UGCCAUGGCUGGGAGCAUAGA | SEQ ID | UCUAUGCUCCCAGCCAUGGCAGA | 2324 |
| NO: 53 | NO: 440 | | NO: 826 | | |
| Duplex | SEQ ID | GCCAUGGCUGGGAGCAUAGGA | SEQ ID | UCCUAUGCUCCCAGCCAUGGCAG | 2325 |
| NO: 54 | NO: 441 | | NO: 827 | | |
| Duplex | SEQ ID | ACAGGAUGCAGCACAGAAUGA | SEQ ID | UCAUUCUGUGCUGCAUCCUGUUC | 2399 |
| NO: 55 | NO: 442 | | NO: 828 | | |
| Duplex | SEQ ID | GUAGUUCAAACUGUAUUACUA | SEQ ID | UAGUAAUACAGUUUGAACUACCA | 2422 |
| NO: 56 | NO: 443 | | NO: 829 | | |
| Duplex | SEQ ID | GUUCAAACUGUAUUACUUUAA | SEQ ID | UUAAAGUAAUACAGUUUGAACUA | 2425 |
| NO: 57 | NO: 444 | | NO: 830 | | |
| Duplex | SEQ ID | UUCAAACUGUAUUACUUUAAA | SEQ ID | UUUAAAGUAAUACAGUUUGAACU | 2426 |
| NO: 58 | NO: 445 | | NO: 831 | | |
| Duplex | SEQ ID | UCAAACUGUAUUACUUUAAUA | SEQ ID | UAUUAAAGUAAUACAGUUUGAAC | 2427 |
| NO: 59 | NO: 446 | | NO: 832 | | |
| Duplex | SEQ ID | AACUGUAUUACUUUAAUGGAA | SEQ ID | UUCCAUUAAAGUAAUACAGUUUG | 2430 |
| NO: 60 | NO: 447 | | NO: 833 | | |
| Duplex | SEQ ID | ACUGUAUUACUUUAAUGGAAA | SEQ ID | UUUCCAUUAAAGUAAUACAGUUU | 2431 |
| NO: 61 | NO: 448 | | NO: 834 | | |
| Duplex | SEQ ID | CUGUAUUACUUUAAUGGAAGA | SEQ ID | UCUUCCAUUAAAGUAAUACAGUU | 2432 |
| NO: 62 | NO: 449 | | NO: 835 | | |
| Duplex | SEQ ID | UGUAUUACUUUAAUGGAAGCA | SEQ ID | UGCUUCCAUUAAAGUAAUACAGU | 2433 |
| NO: 63 | NO: 450 | | NO: 836 | | |
| Duplex | SEQ ID | UUAUAUAUCAGCUGCACCAUA | SEQ ID | UAUGGUGCAGCUGAUAUAUAAAU | 2475 |
| NO: 64 | NO: 451 | | NO: 837 | | |
| Duplex | SEQ ID | UAUAUAUCAGCUGCACCAUGA | SEQ ID | UCAUGGUGCAGCUGAUAUAUAAA | 2476 |
| NO: 65 | NO: 452 | | NO: 838 | | |
| Duplex | SEQ ID | AUAUAUCAGCUGCACCAUGCA | SEQ ID | UGCAUGGUGCAGCUGAUAUAUAA | 2477 |
| NO: 66 | NO: 453 | | NO: 839 | | |
| Duplex | SEQ ID | UAUAUCAGCUGCACCAUGCCA | SEQ ID | UGGCAUGGUGCAGCUGAUAUAUA | 2478 |
| NO: 67 | NO: 454 | | NO: 840 | | |
| Duplex | SEQ ID | AUAUCAGCUGCACCAUGCCAA | SEQ ID | UUGGCAUGGUGCAGCUGAUAUAU | 2479 |
| NO: 68 | NO: 455 | | NO: 841 | | |
| Duplex | SEQ ID | AUCAGCUGCACCAUGCCAUCA | SEQ ID | UGAUGGCAUGGUGCAGCUGAUAU | 2481 |
| NO: 69 | NO: 456 | | NO: 842 | | |
| Duplex | SEQ ID | UUUGCAGAUGCUAGGUGUUCA | SEQ ID | UGAACACCUAGCAUCUGCAAACA | 2555 |
| NO: 70 | NO: 457 | | NO: 843 | | |
| Duplex | SEQ ID | UGCAGAUGCUAGGUGUUCAAA | SEQ ID | UUUGAACACCUAGCAUCUGCAAA | 2557 |
| NO: 71 | NO: 458 | | NO: 844 | | |
| Duplex | SEQ ID | GCAGAUGCUAGGUGUUCAAGA | SEQ ID | UCUUGAACACCUAGCAUCUGCAA | 2558 |
| NO: 72 | NO: 459 | | NO: 845 | | |
| Duplex | SEQ ID | CAGAUGCUAGGUGUUCAAGGA | SEQ ID | UCCUUGAACACCUAGCAUCUGCA | 2559 |
| NO: 73 | NO: 460 | | NO: 846 | | |
| Duplex | SEQ ID | AGAUGCUAGGUGUUCAAGGAA | SEQ ID | UUCCUUGAACACCUAGCAUCUGC | 2560 |
| NO: 74 | NO: 461 | | NO: 847 | | |
| Duplex | SEQ ID | GCUAGGUGUUCAAGGAGCAUA | SEQ ID | UAUGCUCCUUGAACACCUAGCAU | 2564 |
| NO: 75 | NO: 462 | | NO: 848 | | |
| Duplex | SEQ ID | UAGGUGUUCAAGGAGCAUGCA | SEQ ID | UGCAUGCUCCUUGAACACCUAGC | 2566 |
| NO: 76 | NO: 463 | | NO: 849 | | |
| Duplex | SEQ ID | AGGUGUUCAAGGAGCAUGCAA | SEQ ID | UUGCAUGCUCCUUGAACACCUAG | 2567 |
| NO: 77 | NO: 464 | | NO: 850 | | |
| Duplex | SEQ ID | GGUGUUCAAGGAGCAUGCAAA | SEQ ID | UUUGCAUGCUCCUUGAACACCUA | 2568 |
| NO: 78 | NO: 465 | | NO: 851 | | |
| Duplex | SEQ ID | UGUUCAAGGAGCAUGCAAAGA | SEQ ID | UCUUUGCAUGCUCCUUGAACACC | 2570 |
| NO: 79 | NO: 466 | | NO: 852 | | |
| Duplex | SEQ ID | GUUCAAGGAGCAUGCAAAGAA | SEQ ID | UUCUUUGCAUGCUCCUUGAACAC | 2571 |
| NO: 80 | NO: 467 | | NO: 853 | | |
| Duplex | SEQ ID | CCCGGCAGCUUGCCCGAAUUA | SEQ ID | UAAUUCGGGCAAGCUGCCGGGCA | 2608 |
| NO: 81 | NO: 468 | | NO: 854 | | |
| Duplex | SEQ ID | CGGCAGCUUGCCCGAAUUGUA | SEQ ID | UACAAUUCGGGCAAGCUGCCGGG | 2610 |
| NO: 82 | NO: 469 | | NO: 855 | | |
| Duplex | SEQ ID | CAUUGGCAGCAGGACAUCUUA | SEQ ID | UAAGAUGUCCUGCUGCCAAUGCU | 2671 |
| NO: 83 | NO: 470 | | NO: 856 | | |
| Duplex | SEQ ID | AUUGGCAGCAGGACAUCUUGA | SEQ ID | UCAAGAUGUCCUGCUGCCAAUGC | 2672 |
| NO: 84 | NO: 471 | | NO: 857 | | |
| Duplex | SEQ ID | UGGCAGCAGGACAUCUUGUCA | SEQ ID | UGACAAGAUGUCCUGCUGCCAAU | 2674 |
| NO: 85 | NO: 472 | | NO: 858 | | |
| Duplex | SEQ ID | UAUUUGUUCAGAGAGGCCUUA | SEQ ID | UAAGGCCUCUCUGAACAAAUAGC | 3456 |
| NO: 86 | NO: 473 | | NO: 859 | | |
| Duplex | SEQ ID | UUACUAAAGAUAUCAGAGCUA | SEQ ID | UAGCUCUGAUAUCUUUAGUAAAG | 3575 |
| NO: 87 | NO: 474 | | NO: 860 | | |
| Duplex | SEQ ID | CAAAUCUGUAUAUGUUGUAAA | SEQ ID | UUUACAACAUAUACAGAUUUGAU | 3767 |
| NO: 88 | NO: 475 | | NO: 861 | | |
| Duplex | SEQ ID | AAAUCUGUAUAUGUUGUAAUA | SEQ ID | UAUUACAACAUAUACAGAUUUGA | 3768 |
| NO: 89 | NO: 476 | | NO: 862 | | |
| Duplex | SEQ ID | GUACUGAUAAAAUACUCUAGA | SEQ ID | UCUAGAGUAUUUUAUCAGUACAC | 3839 |
| NO: 90 | NO: 477 | | NO: 863 | | |
| Duplex | SEQ ID | UUGUCCAGGAAACCCUGGCUA | SEQ ID | UAGCCAGGGUUUCCUGGACAACA | 3890 |
| NO: 91 | NO: 478 | | NO: 864 | | |
| Duplex | SEQ ID | UCCAGGAAACCCUGGCUUGCA | SEQ ID | UGCAAGCCAGGGUUUCCUGGACA | 3893 |
| NO: 92 | NO: 479 | | NO: 865 | | |
| Duplex | SEQ ID | UUGUAGAAGAUGGACUCUGAA | SEQ ID | UUCAGAGUCCAUCUUCUACAAGA | 4202 |
| NO: 93 | NO: 480 | | NO: 866 | | |
| Duplex | SEQ ID | UGUAGAAGAUGGACUCUGAAA | SEQ ID | UUUCAGAGUCCAUCUUCUACAAG | 4203 |
| NO: 94 | NO: 481 | | NO: 867 | | |
| Duplex | SEQ ID | UAAUGUUUUGUACAAUUACUA | SEQ ID | UAGUAAUUGUACAAAACAUUAAU | 4439 |
| NO: 95 | NO: 482 | | NO: 868 | | |
| Duplex | SEQ ID | UAUACAUUUUGUUAUAGAAUA | SEQ ID | UAUUCUAUAACAAAAUGUAUACA | 4465 |
| NO: 96 | NO: 483 | | NO: 869 | | |
| Duplex | SEQ ID | UACAUUUUGUUAUAGAAUACA | SEQ ID | UGUAUUCUAUAACAAAAUGUAUA | 4467 |
| NO: 97 | NO: 484 | | NO: 870 | | |
| Duplex | SEQ ID | ACAUUUUGUUAUAGAAUACUA | SEQ ID | UAGUAUUCUAUAACAAAAUGUAU | 4468 |
| NO: 98 | NO: 485 | | NO: 871 | | |
| Duplex | SEQ ID | CAAUGUUGUCAAGACUUUUUA | SEQ ID | UAAAAAGUCUUGACAACAUUGUA | 103 |
| NO: 99 | NO: 486 | | NO: 872 | | |
| Duplex | SEQ ID | AAUGUUGUCAAGACUUUUUCA | SEQ ID | UGAAAAAGUCUUGACAACAUUGU | 104 |
| NO: 100 | NO: 487 | | NO: 873 | | |
| Duplex | SEQ ID | AUGUUGUCAAGACUUUUUCGA | SEQ ID | UCGAAAAAGUCUUGACAACAUUG | 105 |
| NO: 101 | NO: 488 | | NO: 874 | | |
| Duplex | SEQ ID | UCUGCAUGAUGUCCAUGAACA | SEQ ID | UGUUCAUGGACAUCAUGCAGAUG | 190 |
| NO: 102 | NO: 489 | | NO: 875 | | |
| Duplex | SEQ ID | CUGCAUGAUGUCCAUGAACAA | SEQ ID | UUGUUCAUGGACAUCAUGCAGAU | 191 |
| NO: 103 | NO: 490 | | NO: 876 | | |
| Duples | SEQ ID | UAAGAUCUGUGGUUGGAAUUA | SEQ ID | UAAUUCCAACCACAGAUCUUAUU | 227 |
| NO: 104 | NO: 491 | | NO: 877 | | |
| Duplex | SEQ ID | AAGAUCUGUGGUUGGAAUUAA | SEQ ID | UUAAUUCCAACCACAGAUCUUAU | 228 |
| NO: 105 | NO: 492 | | NO: 878 | | |
| Duplex | SEQ ID | AGAUCUGUGGUUGGAAUUAUA | SEQ ID | UAUAAUUCCAACCACAGAUCUUA | 229 |
| NO: 106 | NO: 493 | | NO: 879 | | |
| Duplex | SEQ ID | UGUAUAUUUACUUCCAGUUCA | SEQ ID | UGAACUGGAAGUAAAUAUACAGG | 325 |
| NO: 107 | NO: 494 | | NO: 880 | | |
| Duplex | SEQ ID | GUAUAUUUACUUCCAGUUCCA | SEQ ID | UGGAACUGGAAGUAAAUAUACAG | 326 |
| NO: 108 | NO: 495 | | NO: 881 | | |
| Duplex | SEQ ID | UAUAUUUACUUCCAGUUCCAA | SEQ ID | UUGGAACUGGAAGUAAAUAUACA | 327 |
| NO: 109 | NO: 496 | | NO: 882 | | |
| Duplex | SEQ ID | UUUACUUCCAGUUCCAGAAUA | SEQ ID | UAUUCUGGAACUGGAAGUAAAUA | 331 |
| NO: 110 | NO: 497 | | NO: 883 | | |
| Duplex | SEQ ID | UAUUUUGGGUAUUGCUGGCCA | SEQ ID | UGGCCAGCAAUACCCAAAAUAUA | 374 |
| NO: 111 | NO: 498 | | NO: 884 | | |
| Duplex | SEQ ID | UAUUCAGUACAGUUGUCAUUA | SEQ ID | UAAUGACAACUGUACUGAAUACA | 418 |
| NO: 112 | NO: 499 | | NO: 885 | | |
| Duplex | SEQ ID | AUUCAGUACAGUUGUCAUUCA | SEQ ID | UGAAUGACAACUGUACUGAAUAC | 419 |
| NO: 113 | NO: 500 | | NO: 886 | | |
| Duplex | SEQ ID | AGACAAAGAAUUGACAGGCUA | SEQ ID | UAGCCUGUCAAUUCUUUGUCUAA | 446 |
| NO: 114 | NO: 501 | | NO: 887 | | |
| Duplex | SEQ ID | GACAAAGAAUUGACAGGCUUA | SEQ ID | UAAGCCUGUCAAUUCUUUGUCUA | 447 |
| NO: 115 | NO: 502 | | NO: 888 | | |
| Duplex | SEQ ID | GCUUGAAUGAAGCUUUGCCCA | SEQ ID | UGGGCAAAGCUUCAUUCAAGCCU | 463 |
| NO: 116 | NO: 503 | | NO: 889 | | |
| Duplex | SEQ ID | CUUGAAUGAAGCUUUGCCCUA | SEQ ID | UAGGGCAAAGCUUCAUUCAAGCC | 464 |
| NO: 117 | NO: 504 | | NO: 890 | | |
| Duplex | SEQ ID | UUGAAUGAAGCUUUGCCCUUA | SEQ ID | UAAGGGCAAAGCUUCAUUCAAGC | 465 |
| NO: 118 | NO: 505 | | NO: 891 | | |
| Duplex | SEQ ID | AUGAAGCUUUGCCCUUUUUCA | SEQ ID | UGAAAAAGGGCAAAGCUUCAUUC | 469 |
| NO: 119 | NO: 506 | | NO: 892 | | |
| Duplex | SEQ ID | CAAAGUUUGCCCUCAGUUCCA | SEQ ID | UGGAACUGAGGGCAAACUUUGCU | 526 |
| NO: 120 | NO: 507 | | NO: 893 | | |
| Duplex | SEQ ID | AAGUUUGCCCUCAGUUCCAAA | SEQ ID | UUUGGAACUGAGGGCAAACUUUG | 528 |
| NO: 121 | NO: 508 | | NO: 894 | | |
| Duplex | SEQ ID | CAACUCACAGGAUGAAGUAAA | SEQ ID | UUUACUUCAUCCUGUGAGUUGGA | 545 |
| NO: 122 | NO: 509 | | NO: 895 | | |
| Duplex | SEQ ID | AACUCACAGGAUGAAGUAAGA | SEQ ID | UCUUACUUCAUCCUGUGAGUUGG | 546 |
| NO: 123 | NO: 510 | | NO: 896 | | |
| Duplex | SEQ ID | GAAGUAAGGGAAAAUAUUGCA | SEQ ID | UGCAAUAUUUUCCCUUACUUCAU | 558 |
| NO: 124 | NO: 511 | | NO: 897 | | |
| Duplex | SEQ ID | AAGUAAGGGAAAAUAUUGCUA | SEQ ID | UAGCAAUAUUUUCCCUUACUUCA | 559 |
| NO: 125 | NO: 512 | | NO: 898 | | |
| Duplex | SEQ ID | GUAAGGGAAAAUAUUGCUCGA | SEQ ID | UCGAGCAAUAUUUUCCCUUACUU | 561 |
| NO: 126 | NO: 513 | | NO: 899 | | |
| Duplex | SEQ ID | AAGGGAAAAUAUUGCUCGUGA | SEQ ID | UCACGAGCAAUAUUUUCCCUUAC | 563 |
| NO: 127 | NO: 514 | | NO: 900 | | |
| Duplex | SEQ ID | AGGGAAAAUAUUGCUCGUGGA | SEQ ID | UCCACGAGCAAUAUUUUCCCUUA | 564 |
| NO: 128 | NO: 515 | | NO: 901 | | |
| Duplex | SEQ ID | GGGAAAAUAUUGCUCGUGGAA | SEQ ID | UUCCACGAGCAAUAUUUUCCCUU | 565 |
| NO: 129 | NO: 516 | | NO: 902 | | |
| Duplex | SEQ ID | GGAAAAUAUUGCUCGUGGAAA | SEQ ID | UUUCCACGAGCAAUAUUUUCCCU | 566 |
| NO: 130 | NO: 517 | | NO: 903 | | |
| Duplex | SEQ ID | AAAUAUUGCUCGUGGAAUGGA | SEQ ID | UCCAUUCCACGAGCAAUAUUUUC | 569 |
| NO: 131 | NO: 518 | | NO: 904 | | |
| Duplex | SEQ ID | AAUAUUGCUCGUGGAAUGGCA | SEQ ID | UGCCAUUCCACGAGCAAUAUUUU | 570 |
| NO: 132 | NO: 516 | | NO: 905 | | |
| Duplex | SEQ ID | AUAUUGCUCGUGGAAUGGCAA | SEQ ID | UUGCCAUUCCACGAGCAAUAUUU | 571 |
| NO: 133 | NO: 520 | | NO: 906 | | |
| Duplex | SEQ ID | UAUUGCUCGUGGAAUGGCAAA | SEQ ID | UUUGCCAUUCCACGAGCAAUAUU | 572 |
| NO: 134 | NO: 521 | | NO: 907 | | |
| Duplex | SEQ ID | AUUGCUCGUGGAAUGGCAAUA | SEQ ID | UAUUGCCAUUCCACGAGCAAUAU | 573 |
| NO: 135 | NO: 522 | | NO: 908 | | |
| Duplex | SEQ ID | UUGCUCGUGGAAUGGCAAUUA | SEQ ID | UAAUUGCCAUUCCACGAGCAAUA | 574 |
| NO: 136 | NO: 523 | | NO: 909 | | |
| Duplex | SEQ ID | UUGAAUGUCUUGUGAUUGGAA | SEQ ID | UUCCAAUCACAAGACAUUCAACA | 625 |
| NO: 137 | NO: 524 | | NO: 910 | | |
| Duplex | SEQ ID | UGAAUGUCUUGUGAUUGGAGA | SEQ ID | UCUCCAAUCACAAGACAUUCAAC | 626 |
| NO: 138 | NO: 525 | | NO: 911 | | |
| Duplex | SEQ ID | UCUUGUGAUUGGAGUUGGUAA | SEQ ID | UUACCAACUCCAAUCACAAGACA | 632 |
| NO: 139 | NO: 526 | | NO: 912 | | |
| Duplex | SEQ ID | CUUGUGAUUGGAGUUGGUACA | SEQ ID | UGUACCAACUCCAAUCACAAGAC | 633 |
| NO: 141 | NO: 527 | | NO: 913 | | |
| Duplex | SEQ ID | UUGUGAUUGGAGUUGGUACCA | SEQ ID | UGGUACCAACUCCAAUCACAAGA | 634 |
| NO: 141 | NO: 528 | | NO: 914 | | |
| Duplex | SEQ ID | GUGAUUGGAGUUGGUACCAUA | SEQ ID | UAUGGUACCAACUCCAAUCACAA | 636 |
| NO: 142 | NO: 529 | | NO: 915 | | |
| Duplex | SEQ ID | GAUUGGAGUUGGUACCAUGUA | SEQ ID | UACAUGGUACCAACUCCAAUCAC | 638 |
| NO: 143 | NO: 530 | | NO: 916 | | |
| Duplex | SEQ ID | AUUGGAGUUGGUACCAUGUCA | SEQ ID | UGACAUGGUACCAACUCCAAUCA | 639 |
| NO: 144 | NO: 531 | | NO: 917 | | |
| Duplex | SEQ ID | UGGAGUUGGUACCAUGUCAGA | SEQ ID | UCUGACAUGGUACCAACUCCAAU | 641 |
| NO: 145 | NO: 532 | | NO: 918 | | |
| Duplex | SEQ ID | GGAGUUGGUACCAUGUCAGGA | SEQ ID | UCCUGACAUGGUACCAACUCCAA | 642 |
| NO: 146 | NO: 533 | | NO: 919 | | |
| Duplex | SEQ ID | UAUGUGCUGCUUUGGCUGCAA | SEQ ID | UUGCAGCCAAAGCAGCACAUAAU | 680 |
| NO: 147 | NO: 534 | | NO: 920 | | |
| Duplex | SEQ ID | UUGCCAACUACUUCGUGUUCA | SEQ ID | UGAACACGAAGUAGUUGGCAAGA | 709 |
| NO: 148 | NO: 535 | | NO: 921 | | |
| Duplex | SEQ ID | UGCCAACUACUUCGUGUUCAA | SEQ ID | UUGAACACGAAGUAGUUGGCAAG | 710 |
| NO: 149 | NO: 536 | | NO: 922 | | |
| Duplex | SEQ ID | GCCAACUACUUCGUGUUCAUA | SEQ ID | UAUGAACACGAAGUAGUUGGCAA | 711 |
| NO: 150 | NO: 537 | | NO: 923 | | |
| Duplex | SEQ ID | CCAAUCACUUCGUGUUCAUGA | SEQ ID | UCAUGAACACGAAGUAGUUGGCA | 712 |
| NO: 151 | NO: 538 | | NO: 924 | | |
| Duplex | SEQ ID | AACUACUUCGUGUUCAUGACA | SEQ ID | UGUCAUGAACACGAAGUAGUUGG | 714 |
| NO: 152 | NO: 539 | | NO: 925 | | |
| Duplex | SEQ ID | AUUAGAGCUUUCUCGGGAAAA | SEQ ID | UUUUCCCGAGAAAGCUCUAAUAC | 761 |
| NO: 153 | NO: 540 | | NO: 926 | | |
| Duplex | SEQ ID | UUAGAGCUUUCUCGGGAAAGA | SEQ ID | UCUUUCCCGAGAAAGCUCUAAUA | 762 |
| NO: 154 | NO: 541 | | NO: 927 | | |
| Duplex | SEQ ID | UAGAGCUUUCUCGGGAAAGCA | SEQ ID | UGCUUUCCCGAGAAAGCUCUAAU | 763 |
| NO: 155 | NO: 542 | | NO: 928 | | |
| Duplex | SEQ ID | GAGCUUUCUCGGGAAAGCCGA | SEQ ID | UCGGCUUUCCCGAGAAAGCUCUA | 765 |
| NO: 156 | NO: 543 | | NO: 929 | | |
| Duplex | SEQ ID | GGGAAAGCCGCGAGGGUCGUA | SEQ ID | UACGACCCUCGCGGCUUUCCCGA | 775 |
| NO: 157 | NO: 544 | | NO: 930 | | |
| Duplex | SEQ ID | GGAAAGCCGCGAGGGUCGUCA | SEQ ID | UGACGACCCUCGCGGCUUUCCCG | 776 |
| NO: 158 | NO: 545 | | NO: 931 | | |
| Duplex | SEQ ID | GAAAGCCGCGAGGGUCGUCCA | SEQ ID | UGGACGACCCUCGCGGCUUUCCC | 777 |
| NO: 159 | NO: 546 | | NO: 932 | | |
| Duplex | SEQ ID | AAAGCCGCGAGGGUCGUCCAA | SEQ ID | UUGGACGACCCUCGCGGCUUUCC | 778 |
| NO: 160 | NO: 547 | | NO: 933 | | |
| Duplex | SEQ ID | AAGCCGCGAGGGUCGUCCAAA | SEQ ID | UUUGGACGACCCUCGCGGCUUUC | 779 |
| NO: 161 | NO: 548 | | NO: 934 | | |
| Duplex | SEQ ID | AGCCGCGAGGGUCGUCCAAUA | SEQ ID | UAUUGGACGACCCUCGCGGCUUU | 780 |
| NO: 162 | NO: 549 | | NO: 935 | | |
| Duplex | SEQ ID | GCCGCGAGGGUCGUCCAAUUA | SEQ ID | UAAUUGGACGACCCUCGCGGCUU | 781 |
| NO: 163 | NO: 550 | | NO: 936 | | |
| Duplex | SEQ ID | CCGCGAGGGUCGUCCAAUUUA | SEQ ID | UAAAUUGGACGACCCUCGCGGCU | 782 |
| NO: 164 | NO: 551 | | NO: 937 | | |
| Duplex | SEQ ID | CGCGAGGGUCGUCCAAUUUGA | SEQ ID | UCAAAUUGGACGACCCUCGCGGC | 783 |
| NO: 165 | NO: 552 | | NO: 938 | | |
| Duplex | SEQ ID | CCCGAGUUUUAGAAGAAGAAA | SEQ ID | UUUCUUCUUCUAAAACUCGGGCA | 820 |
| NO: 166 | NO: 553 | | NO: 939 | | |
| Duplex | SEQ ID | CUCAGAGGGUCAAGAUGAUUA | SEQ ID | UAAUCAUCUUGACCCUCUGAGUU | 862 |
| NO: 167 | NO: 554 | | NO: 940 | | |
| Duplex | SEQ ID | GGUCAAGAUGAUUAUGUCUCA | SEQ ID | UGAGACAUAAUCAUCUUGACCCU | 869 |
| NO: 168 | NO: 555 | | NO: 941 | | |
| Duplex | SEQ ID | GUCAAGAUGAUUAUGUCUCUA | SEQ ID | UAGAGACAUAAUCAUCUUGACCC | 870 |
| NO: 169 | NO: 556 | | NO: 942 | | |
| Duplex | SEQ ID | CAAGAUGAUUAUGUCUCUAGA | SEQ ID | UCUAGAGACAUAAUCAUCUUGAC | 872 |
| NO: 170 | NO: 557 | | NO: 943 | | |
| Duplex | SEQ ID | AAGAUGAUUAUGUCUCUAGGA | SEQ ID | UCCUAGAGACAUAAUCAUCUUGA | 873 |
| NO: 171 | NO: 558 | | NO: 944 | | |
| Duplex | SEQ ID | AGAUGAUUAUGUCUCUAGGCA | SEQ ID | UGCCUAGAGACAUAAUCAUCUUG | 874 |
| NO: 172 | NO: 559 | | NO: 945 | | |
| Duplex | SEQ ID | GAUGAUUAUGUCUCUAGGCUA | SEQ ID | UAGCCUAGAGACAUAAUCAUCUU | 875 |
| NO: 173 | NO: 560 | | NO: 946 | | |
| Duplex | SEQ ID | AUGAUUAUGUCUCUAGGCUUA | SEQ ID | UAAGCCUAGAGACAUAAUCAUCU | 876 |
| NO: 174 | NO: 561 | | NO: 947 | | |
| Duplex | SEQ ID | AGAUUAUGUCUCUAGGCUUGA | SEQ ID | UCAAGCCUAGAGACAUAAUCAUC | 877 |
| NO: 175 | NO: 562 | | NO: 948 | | |
| Duplex | SEQ ID | AUGCUCACAGUCGCUGGAUAA | SEQ ID | UUAUCCAGCGACUGUGAGCAUGA | 907 |
| NO: 176 | NO: 563 | | NO: 949 | | |
| Duplex | SEQ ID | UGCUCACAGUCGCUGGAUAGA | SEQ ID | UCUAUCCAGCGACUGUGAGCAUG | 908 |
| NO: 177 | NO: 564 | | NO: 950 | | |
| Duplex | SEQ ID | GCUCACAGUCGCUGGAUAGCA | SEQ ID | UGCUAUCCAGCGACUGUGAGCAU | 909 |
| NO: 178 | NO: 565 | | NO: 951 | | |
| Duplex | SEQ ID | CUCACAGUCGCUGGAUAGCUA | SEQ ID | UAGCUAUCCAGCGACUGUGAGCA | 910 |
| NO: 179 | NO: 566 | | NO: 952 | | |
| Duplex | SEQ ID | UCACAGUCGCUGGAUAGCUGA | SEQ ID | UCAGCUAUCCAGCGACUGUGAGC | 911 |
| NO: 180 | NO: 567 | | NO: 953 | | |
| Duplex | SEQ ID | CACAGUCGCUGGAUAGCUGAA | SEQ ID | UUCAGCUAUCCAGCGACUGUGAG | 912 |
| NO: 181 | NO: 568 | | NO: 954 | | |
| Duplex | SEQ ID | GAAUUGAACCAAGUGUUUCCA | SEQ ID | UGGAAACACUUGGUUCAAUUCUC | 1003 |
| NO: 182 | NO: 569 | | NO: 955 | | |
| Duplex | SEQ ID | GAACCAAGUGUUUCCCUCUGA | SEQ ID | UCAGAGGGAAACACUUGGUUCAA | 1008 |
| NO: 183 | NO: 570 | | NO: 956 | | |
| Duplex | SEQ ID | AAAUGAUCAGCAUGGAUAUUA | SEQ ID | UAAUAUCCAUGCUGAUCAUUUUA | 1045 |
| NO: 184 | NO: 571 | | NO: 957 | | |
| Duplex | SEQ ID | AUGAUCAGCAUGGAUAUUGAA | SEQ ID | UUCAAUAUCCAUGCUGAUCAUUU | 1047 |
| NO: 185 | NO: 572 | | NO: 958 | | |
| Duplex | SEQ ID | UCUCCUUCUGGCUGUCAAGUA | SEQ ID | UACUUGACAGCCAGAAGGAGAGC | 1091 |
| NO: 186 | NO: 573 | | NO: 959 | | |
| Duplex | SEQ ID | CUCCUUCUGGCUGUCAAGUAA | SEQ ID | UUACUUGACAGCCAGAAGGAGAG | 1092 |
| NO: 187 | NO: 574 | | NO: 960 | | |
| Duplex | SEQ ID | AACAGAGACAGAAUCUACACA | SEQ ID | UGUGUAGAUUCUGUCUCUGUUUG | 1127 |
| NO: 188 | NO: 575 | | NO: 961 | | |
| Duplex | SEQ ID | ACAGAGACAGAAUCUACACUA | SEQ ID | UAGUGUAGAUUCUGUCUCUGUUU | 1128 |
| NO: 189 | NO: 576 | | NO: 962 | | |
| Duplex | SEQ ID | AUUGUUGUAGACGUGAACCUA | SEQ ID | UAGGUUCACGUCUACAACAAUUG | 1204 |
| NO: 190 | NO: 577 | | NO: 963 | | |
| Duplex | SEQ ID | AAGUUGAGGUUAUAAAACCCA | SEQ ID | UGGGUUUUAUAACCUCAACUUUU | 1291 |
| NO: 191 | NO: 578 | | NO: 964 | | |
| Duplex | SEQ ID | GUUGAGGUUAUAAAACCCUUA | SEQ ID | UAAGGGUUUUAUAACCUCAACUU | 1293 |
| NO: 192 | NO: 579 | | NO: 965 | | |
| Duplex | SEQ ID | UUGAGGUUAUAAAACCCUUAA | SEQ ID | UUAAGGGUUUUAUAACCUCAACU | 1294 |
| NO: 193 | NO: 580 | | NO: 966 | | |
| Duplex | SEQ ID | UGAGGUUAUAAAACCCUUAGA | SEQ ID | UCUAAGGGUUUUAUAACCUCAAC | 1295 |
| NO: 194 | NO: 581 | | NO: 967 | | |
| Duplex | SEQ ID | GCAGAGAAAGGUGCAAAAUUA | SEQ ID | UAAUUUUGCACCUUUCUCUGCAU | 1467 |
| NO: 195 | NO: 582 | | NO: 968 | | |
| Duplex | SEQ ID | CAGAGAAAGGUGCAAAAUUCA | SEQ ID | UGAAUUUUGCACCUUUCUCUGCA | 1468 |
| NO: 196 | NO: 583 | | NO: 969 | | |
| Duplex | SEQ ID | AGAGAAAGGUGCAAAAUUCCA | SEQ ID | UGGAAUUUUGCACCUUUCUCUGC | 1469 |
| NO: 197 | NO: 584 | | NO: 970 | | |
| Duplex | SEQ ID | GAGAAAGGUGCAAAAUUCCUA | SEQ ID | UAGGAAUUUUGCACCUUUCUCUG | 1470 |
| NO: 198 | NO: 585 | | NO: 971 | | |
| Duplex | SEQ ID | AGAAAGGUGCAAAAUUCCUUA | SEQ ID | UAAGGAAUUUUGCACCUUUCUCU | 1471 |
| NO: 199 | NO: 586 | | NO: 972 | | |
| Duplex | SEQ ID | GAAAGGUGCAAAAUUCCUUAA | SEQ ID | UUAAGGAAUUUUGCACCUUUCUC | 1472 |
| NO: 200 | NO: 587 | | NO: 973 | | |
| Duplex | SEQ ID | AAAGGUGCAAAAUUCCUUAGA | SEQ ID | UCUAAGGAAUUUUGCACCUUUCU | 1473 |
| NO: 201 | NO: 588 | | NO: 974 | | |
| Duplex | SEQ ID | AAGGUGCAAAAUUCCUUAGUA | SEQ ID | UACUAAGGAAUUUUGCACCUUUC | 1474 |
| NO: 202 | NO: 589 | | NO: 975 | | |
| Duplex | SEQ ID | AGGUGCAAAAUUCCUUAGUGA | SEQ ID | UCACUAAGGAAUUUUGCACCUUU | 1475 |
| NO: 203 | NO: 590 | | NO: 976 | | |
| Duplex | SEQ ID | AGCAAAAUUCCUUAGUGAUGA | SEQ ID | UCAUCACUAAGGAAUUUUGCACC | 1478 |
| NO: 204 | NO: 591 | | NO: 977 | | |
| Duplex | SEQ ID | GCAAAAUUCCUUAGUGAUGCA | SEQ ID | UGCAUCACUAAGGAAUUUUGCAC | 1479 |
| NO: 205 | NO: 592 | | NO: 978 | | |
| Duplex | SEQ ID | AAUUCCUUAGUGAUGCUGAGA | SEQ ID | UCUCAGCAUCACUAAGGAAUUUU | 1483 |
| NO: 206 | NO: 593 | | NO: 979 | | |
| Duplex | SEQ ID | UCCUUAGUGAUGCUGAGAUCA | SEQ ID | UGAUCUCAGCAUCACUAAGGAAU | 1486 |
| NO: 207 | NO: 594 | | NO: 980 | | |
| Duplex | SEQ ID | CCUUAGUGAUGCUGAGAUCAA | SEQ ID | UUGAUCUCAGCAUCACUAAGGAA | 1487 |
| NO: 208 | NO: 595 | | NO: 981 | | |
| Duplex | SEQ ID | CUGAGAUCAUCCAGUUAGUCA | SEQ ID | UGACUAACUGGAUGAUCUCAGCA | 1498 |
| NO: 209 | NO: 596 | | NO: 982 | | |
| Duplex | SEQ ID | UGAGAUCAUCCAGUUAGUCAA | SEQ ID | UUGACUAACUGGAUGAUCUCAGC | 1499 |
| NO: 210 | NO: 597 | | NO: 983 | | |
| Duplex | SEQ ID | GAGAUCAUCCAGUUAGUCAAA | SEQ ID | UUUGACUAACUGGAUGAUCUCAG | 1500 |
| NO: 211 | NO: 598 | | NO: 984 | | |
| Duplex | SEQ ID | AUCAUCCAGUUAGUCAAUGCA | SEQ ID | UGCAUUGACUAACUGGAUGAUCU | 1503 |
| NO: 212 | NO: 599 | | NO: 985 | | |
| Duplex | SEQ ID | GUCAAUGCUAAGCAUAUCCCA | SEQ ID | UGGGAUAUGCUUAGCAUUGACUA | 1515 |
| NO: 213 | NO: 600 | | NO: 986 | | |
| Duplex | SEQ ID | CUAAGCAUAUCCCAGCCUACA | SEQ ID | UGUAGGCUGGGAUAUGCUUAGCA | 1522 |
| NO: 214 | NO: 601 | | NO: 987 | | |
| Duplex | SEQ ID | AAGCAUAUCCCAGCCUACAAA | SEQ ID | UUUGUAGGCUGGGAUAUGCUUAG | 1524 |
| NO: 215 | NO: 602 | | NO: 988 | | |
| Duplex | SEQ ID | UGGAAACUCUGAUGGAAACUA | SEQ ID | UAGUUUCCAUCAGAGUUUCCAAC | 1546 |
| NO: 216 | NO: 603 | | NO: 989 | | |
| Duplex | SEQ ID | GGAAACUCUGAUGGAAACUCA | SEQ ID | UGAGUUUCCAUCAGAGUUUCCAA | 1547 |
| NO: 217 | NO: 604 | | NO: 990 | | |
| Duplex | SEQ ID | GAAACUCUGAUGGAAACUCAA | SEQ ID | UUGAGUUUCCAUCAGAGUUUCCA | 1548 |
| NO: 218 | NO: 605 | | NO: 991 | | |
| Duplex | SEQ ID | AAACUCUGAUGGAAACUCAUA | SEQ ID | UAUGAGUUUCCAUCAGAGUUUCC | 1549 |
| NO: 219 | NO: 606 | | NO: 992 | | |
| Duplex | SEQ ID | GAUGGAAACUCAUGAGCGUGA | SEQ ID | UCACGCUCAUGAGUUUCCAUCAG | 1556 |
| NO: 220 | NO: 607 | | NO: 993 | | |
| Duplex | SEQ ID | AUGGAAACUCAUGAGCGUGGA | SEQ ID | UCCACGCUCAUGAGUUUCCAUCA | 1557 |
| NO: 221 | NO: 608 | | NO: 994 | | |
| Duplex | SEQ ID | UGGAAACUCAUGAGCGUGGUA | SEQ ID | UACCACGCUCAUGAGUUUCCAUC | 1558 |
| NO: 222 | NO: 609 | | NO: 995 | | |
| Duplex | SEQ ID | GGAAACUCAUGAGCGUGGUGA | SEQ ID | UCACCACGCUCAUGAGUUUCCAU | 1559 |
| NO: 223 | NO: 610 | | NO: 996 | | |
| Duplex | SEQ ID | GAAACUCAUGAGCGUGGUGUA | SEQ ID | UACACCACGCUCAUGAGUUUCCA | 1560 |
| NO: 224 | NO: 611 | | NO: 997 | | |
| Duplex | SEQ ID | AGCGUGGUGUAUCUAUUCGCA | SEQ ID | UGCGAAUAGAUACACCACGCUCA | 1570 |
| NO: 225 | NO: 612 | | NO: 998 | | |
| Duplex | SEQ ID | UACCUUACAGGGAUUAUAAUA | SEQ ID | UAUUAUAAUCCCUGUAAGGUAGG | 1639 |
| NO: 226 | NO: 613 | | NO: 999 | | |
| Duplex | SEQ ID | ACCUUACAGGGAUUAUAAUUA | SEQ ID | UAAUUAUAAUCCCUGUAAGGUAG | 1640 |
| NO: 227 | NO: 614 | | NO: 1000 | | |
| Duplex | SEQ ID | GGGAUUAUAAUUACUCCUUGA | SEQ ID | UCAAGGAGUAAUUAUAAUCCCUG | 1648 |
| NO: 228 | NO: 615 | | NO: 1001 | | |
| Duplex | SEQ ID | GGAUUAUAAUUACUCCUUGGA | SEQ ID | UCCAAGGAGUAAUUAUAAUCCCU | 6149 |
| NO: 229 | NO: 616 | | NO: 1002 | | |
| Duplex | SEQ ID | GAUUAUAAUUACUCCUUGGUA | SEQ ID | UACCAAGGAGUAAUUAUAAUCCC | 1650 |
| NO: 230 | NO: 617 | | NO: 1003 | | |
| Duplex | SEQ ID | AUUAUAAUUACUCCUUGGUGA | SEQ ID | UCACCAAGGAGUAAUUAUAAUCC | 1651 |
| NO: 231 | NO: 618 | | NO: 1004 | | |
| Duplex | SEQ ID | AAUUACUCCUUGGUGAUGGGA | SEQ ID | UCCCAUCACCAAGGAGUAAUUAU | 1656 |
| NO: 232 | NO: 619 | | NO: 1005 | | |
| Duplex | SEQ ID | AUUACUCCUUGGUGAUGGGAA | SEQ ID | UUCCCAUCACCAAGGAGUAAUUA | 1657 |
| NO: 233 | NO: 620 | | NO: 1006 | | |
| Duplex | SEQ ID | CCUUGGUGAUGGGAGCUUGUA | SEQ ID | UACAAGCUCCCAUCACCAAGGAG | 1663 |
| NO: 234 | NO: 621 | | NO: 1007 | | |
| Duplex | SEQ ID | UGGUGAUGGGAGCUUGUUGUA | SEQ ID | UACAACAAGCUCCCAUCACCAAG | 1666 |
| NO: 235 | NO: 622 | | NO: 1008 | | |
| Duplex | SEQ ID | UAUUGGAUAUAUGCCCAUCCA | SEQ ID | UGGAUGGGCAUAUAUCCAAUAAC | 1694 |
| NO: 236 | NO: 623 | | NO: 1009 | | |
| Duplex | SEQ ID | AUUGGAUAUAUGCCCAUCCCA | SEQ ID | UGGGAUGGGCAUAUAUCCAAUAA | 1695 |
| NO: 237 | NO: 624 | | NO: 1010 | | |
| Duplex | SEQ ID | CAGAAGGUUGUCUUGUGGCCA | SEQ ID | UGGCCACAAGACAACCUUCUGUU | 1777 |
| NO: 238 | NO: 625 | | NO: 1011 | | |
| Duplex | SEQ ID | AGGUUGUCUUGUGGCCAGCAA | SEQ ID | UUGCUGGCCACAAGACAACCUUC | 1781 |
| NO: 239 | NO: 626 | | NO: 1012 | | |
| Duplex | SEQ ID | UUGUCUUGUGGCCAGCACCAA | SEQ ID | UUGGUGCUGGCCACAAGACAACC | 1784 |
| NO: 240 | NO: 627 | | NO: 1013 | | |
| Duplex | SEQ ID | UGUCUUGUGGCCAGCACCAAA | SEQ ID | UUUGGUGCUGGCCACAAGACAAC | 1785 |
| NO: 241 | NO: 628 | | NO: 1014 | | |
| Duplex | SEQ ID | AGGUCUUGGUGGAGGUGCCAA | SEQ ID | UUGGCACCUCCACCAAGACCUAU | 1823 |
| NO: 242 | NO: 629 | | NO: 1015 | | |
| Duplex | SEQ ID | GGUCUUGGUGGAGGUGCCAGA | SEQ ID | UCUGGCACCUCCACCAAGACCUA | 1824 |
| NO: 243 | NO: 630 | | NO: 1016 | | |
| Duplex | SEQ ID | GUGGAGGUGCCAGCAGCCGAA | SEQ ID | UUCGGCUGCUGGCACCUCCACCA | 1831 |
| NO: 244 | NO: 631 | | NO: 1017 | | |
| Duplex | SEQ ID | GUGCCAGCAGCCGAGUCCUUA | SEQ ID | UAAGGACUCGGCUGCUGGCACCU | 1837 |
| NO: 245 | NO: 632 | | NO: 1018 | | |
| Duplex | SEQ ID | CAGCAGCCGAGUCCUUGCAGA | SEQ ID | UCUGCAAGGACUCGGCUGCUGGC | 1841 |
| NO: 246 | NO: 633 | | NO: 1019 | | |
| Duplex | SEQ ID | AGCAGCCGAGUCCUUGCAGAA | SEQ ID | UUCUGCAAGGACUCGGCUGCUGG | 1842 |
| NO: 247 | NO: 634 | | NO: 1020 | | |
| Duplex | SEQ ID | GCAGCCGAGUCCUUGCAGAUA | SEQ ID | UAUCUGCAAGGACUCGGCUGCUG | 1843 |
| NO: 248 | NO: 635 | | NO: 1021 | | |
| Duplex | SEQ ID | CAGCCGAGUCCUUGCAGAUGA | SEQ ID | UCAUCUGCAAGGACUCGGCUGCU | 1844 |
| NO: 249 | NO: 636 | | NO: 1022 | | |
| Duplex | SEQ ID | GCCGAGUCCUUGCAGAUGGGA | SEQ ID | UCCCAUCUGCAAGGACUCGGCUG | 1846 |
| NO: 250 | NO: 637 | | NO: 1023 | | |
| Duplex | SEQ ID | CGAGUCCUUGCAGAUGGGAUA | SEQ ID | UAUCCCAUCUGCAAGGACUCGGC | 1848 |
| NO: 251 | NO: 638 | | NO: 1024 | | |
| Duplex | SEQ ID | UUGCAGAUGGGAUGACUCGUA | SEQ ID | UACGAGUCAUCCCAUCUGCAAGG | 1855 |
| NO: 252 | NO: 639 | | NO: 1025 | | |
| Duplex | SEQ ID | UGCAGAUGGGAUGACUCGUGA | SEQ ID | UCACGAGUCAUCCCAUCUGCAAG | 1856 |
| NO: 253 | NO: 640 | | NO: 1026 | | |
| Duplex | SEQ ID | GCAGAUGGGAUGACUCGUGGA | SEQ ID | UCCACGAGUCAUCCCAUCUGCAA | 1857 |
| NO: 254 | NO: 641 | | NO: 1027 | | |
| Duplex | SEQ ID | CAGAUGGGAUGACUCGUGGCA | SEQ ID | UGCCACGAGUCAUCCCAUCUGCA | 1858 |
| NO: 255 | NO: 642 | | NO: 1028 | | |
| Duplex | SEQ ID | AGAUGGGAUGACUCGUGGCCA | SEQ ID | UGGCCACGAGUCAUCCCAUCUGC | 1859 |
| NO: 256 | NO: 643 | | NO: 1029 | | |
| Duplex | SEQ ID | GAUGGGAUGACUCGUGGCCCA | SEQ ID | UGGGCCACGAGUCAUCCCAUCUG | 1860 |
| NO: 257 | NO: 644 | | NO: 1030 | | |
| Duplex | SEQ ID | AUGGGAUGACUCGUGGCCCAA | SEQ ID | UUGGGCCACGAGUCAUCCCAUCU | 1861 |
| NO: 258 | NO: 645 | | NO: 1031 | | |
| Duplex | SEQ ID | UGGGAUGACUCGUGGCCCAGA | SEQ ID | UCUGGGCCACGAGUCAUCCCAUC | 1862 |
| NO: 259 | NO: 646 | | NO: 1032 | | |
| Duplex | SEQ ID | GGGAUGACUCGUGGCCCAGUA | SEQ ID | UACUGGGCCACGAGUCAUCCCAU | 1863 |
| NO: 260 | NO: 647 | | NO: 1033 | | |
| Duplex | SEQ ID | GUGGCCCAGUUGUGCGUCUUA | SEQ ID | UAAGACGCACAACUGGGCCACGA | 1873 |
| NO: 261 | NO: 648 | | NO: 1034 | | |
| Duplex | SEQ ID | UGGCCCAGUUGUGCGUCUUCA | SEQ ID | UGAAGACGCACAACUGGGCCACG | 1874 |
| NO: 262 | NO: 649 | | NO: 1035 | | |
| Duplex | SEQ ID | GCCCAGUUGUGCGUCUUCCAA | SEQ ID | UUGGAAGACGCACAACUGGGCCA | 1876 |
| NO: 263 | NO: 650 | | NO: 1036 | | |
| Duplex | SEQ ID | CCCAGUUGUGCGUCUUCCACA | SEQ ID | UGUGGAAGACGCACAACUGGGCC | 1877 |
| NO: 264 | NO: 651 | | NO: 1037 | | |
| Duplex | SEQ ID | CCAGUUGUGCGUCUUCCACGA | SEQ ID | UCGUGGAAGACGCACAACUGGGC | 1878 |
| NO: 265 | NO: 652 | | NO: 1038 | | |
| Duplex | SEQ ID | CAGUUGUGCGUCUUCCACGUA | SEQ ID | UACGUGGAAGACGCACAACUGGG | 1879 |
| NO: 266 | NO: 653 | | NO: 1039 | | |
| Duplex | SEQ ID | AGUUGUGCGUCUUCCACGUGA | SEQ ID | UCACGUGGAAGACGCACAACUGG | 1880 |
| NO: 267 | NO: 654 | | NO: 1040 | | |
| Duplex | SEQ ID | UUGUGACUCUGCAGAAGUGAA | SEQ ID | UUCACUUCUGCAGAGUCACAAGC | 1901 |
| NO: 268 | NO: 655 | | NO: 1041 | | |
| Duplex | SEQ ID | CUGAAGGGUUCGCAGUGAUAA | SEQ ID | UUAUCACUGCGAACCCUUCAGAU | 1939 |
| NO: 269 | NO: 656 | | NO: 1042 | | |
| Duplex | SEQ ID | UGAAGGGUUCGCAGUGAUAAA | SEQ ID | UUUAUCACUGCGAACCCUUCAGA | 1940 |
| NO: 270 | NO: 657 | | NO: 1043 | | |
| Duplex | SEQ ID | GAAGGGUUCGCAGUGAUAAAA | SEQ ID | UUUUAUCACUGCGAACCCUUCAG | 1941 |
| NO: 271 | NO: 658 | | NO: 1044 | | |
| Duplex | SEQ ID | AGGGUUCGCAGUGAUAAAGGA | SEQ ID | UCCUUUAUCACUGCGAACCCUUC | 1943 |
| NO: 272 | NO: 659 | | NO: 1045 | | |
| Duplex | SEQ ID | GGGUUCGCAGUGAUAAAGGAA | SEQ ID | UUCCUUUAUCACUGCGAACCCUU | 1944 |
| NO: 273 | NO: 660 | | NO: 1046 | | |
| Duplex | SEQ ID | UUCGCAGUGAUAAAGGAGGCA | SEQ ID | UGCCUCCUUUAUCACUGCGAACC | 1947 |
| NO: 274 | NO: 661 | | NO: 1047 | | |
| Duplex | SEQ ID | CAGUGAUAAAGGAGGCAUUUA | SEQ ID | UAAAUGCCUCCUUUAUCACUGCG | 1951 |
| NO: 275 | NO: 662 | | NO: 1048 | | |
| Duplex | SEQ ID | CUAGCAGAUUUGCACGUCUAA | SEQ ID | UUAGACGUGCAAAUCUGCUAGUG | 1978 |
| NO: 276 | NO: 663 | | NO: 1049 | | |
| Duplex | SEQ ID | UAGCAGAUUUGCACGUCUACA | SEQ ID | UGUAGACGUGCAAAUCUGCUAGU | 1979 |
| NO: 277 | NO: 664 | | NO: 1050 | | |
| Duplex | SEQ ID | AGCAGAUUUGCACGUCUACAA | SEQ ID | UUGUAGACGUGCAAAUCUGCUAG | 1980 |
| NO: 278 | NO: 665 | | NO: 1051 | | |
| Duplex | SEQ ID | GCAGAUUUGCACGUCUACAGA | SEQ ID | UCUGUAGACGUGCAAAUCUGCUA | 1981 |
| NO: 279 | NO: 666 | | NO: 1052 | | |
| Duplex | SEQ ID | CAGAUUUGCACGUCUACAGAA | SEQ ID | UUCUGUAGACGUGCAAAUCUGCU | 1982 |
| NO: 280 | NO: 667 | | NO: 1053 | | |
| Duplex | SEQ ID | GAUUUGCACGUCUACAGAAAA | SEQ ID | UUUUCUGUAGACGUGCAAAUCUG | 1984 |
| NO: 281 | NO: 668 | | NO: 1054 | | |
| Duplex | SEQ ID | AUUUGCACGUCUACAGAAACA | SEQ ID | UGUUUCUGUAGACGUGCAAAUCU | 1985 |
| NO: 282 | NO: 669 | | NO: 1055 | | |
| Duplex | SEQ ID | CUGGACGCAACCUUUAUAUCA | SEQ ID | UGAUAUAAAGGUUGCGUCCAGCU | 2020 |
| NO: 283 | NO: 670 | | NO: 1056 | | |
| Duplex | SEQ ID | UGGACGCAACCUUUAUAUCCA | SEQ ID | UGGAUAUAAAGGUUGCGUCCAGC | 2021 |
| NO: 284 | NO: 671 | | NO: 1057 | | |
| Duplex | SEQ ID | GGACGCAACCUUUAUAUCCGA | SEQ ID | UCGGAUAUAAAGGUUGCGUCCAG | 2022 |
| NO: 285 | NO: 672 | | NO: 1058 | | |
| Duplex | SEQ ID | GACGCAACCUUUAUAUCCGUA | SEQ ID | UACGGAUAUAAAGGUUGCGUCCA | 2023 |
| NO: 286 | NO: 673 | | NO: 1059 | | |
| Duplex | SEQ ID | CGCAACCUUUAUAUCCGUUUA | SEQ ID | UAAACGGAUAUAAAGGUUGCGUC | 2025 |
| NO: 287 | NO: 674 | | NO: 1060 | | |
| Duplex | SEQ ID | GCAACCUUUAUAUCCGUUUCA | SEQ ID | UGAAACGGAUAUAAAGGUUGCGU | 2026 |
| NO: 288 | NO: 675 | | NO: 1061 | | |
| Duplex | SEQ ID | CAACCUUUAUAUCCGUUUCCA | SEQ ID | UGGAAACGGAUAUAAAGGUUGCG | 2027 |
| NO: 289 | NO: 676 | | NO: 1062 | | |
| Duplex | SEQ ID | CCUUUAUAUCCGUUUCCAGUA | SEQ ID | UACUGGAAACGGAUAUAAAGGUU | 2030 |
| NO: 290 | NO: 677 | | NO: 1063 | | |
| Duplex | SEQ ID | CUUUAUAUCCGUUUCCAGUCA | SEQ ID | UGACUGGAAACGGAUAUAAAGGU | 2031 |
| NO: 291 | NO: 678 | | NO: 1064 | | |
| Duplex | SEQ ID | UAUCCGUUUCCAGUCCAGGUA | SEQ ID | UACCUGGACUGGAAACGGAUAUA | 2036 |
| NO: 292 | NO: 679 | | NO: 1065 | | |
| Duplex | SEQ ID | UUGUUUGUGAAGCUGUCAUUA | SEQ ID | UAAUGACAGCUUCACAAACAACA | 2221 |
| NO: 293 | NO: 680 | | NO: 1066 | | |
| Duplex | SEQ ID | UUUGUGAAGCUGUCAUUCCAA | SEQ ID | UUGGAAUGACAGCUUCACAAACA | 2224 |
| NO: 294 | NO: 681 | | NO: 1067 | | |
| Duplex | SEQ ID | UUGUGAAGCUGUCAUUCCAGA | SEQ ID | UCUGGAAUGACAGCUUCACAAAC | 2225 |
| NO: 295 | NO: 682 | | NO: 1068 | | |
| Duplex | SEQ ID | GAAGCUGUCAUUCCAGCCAAA | SEQ ID | UUUGGCUGGAAUGACAGCUUCAC | 2229 |
| NO: 296 | NO: 683 | | NO: 1069 | | |
| Duplex | SEQ ID | GCUGUCAUUCCAGCCAAGGUA | SEQ ID | UACCUUGGCUGGAAUGACAGCUU | 2232 |
| NO: 297 | NO: 684 | | NO: 1070 | | |
| Duplex | SEQ ID | CUGUCAUUCCAGCCAAGGUUA | SEQ ID | UAACCUUGGCUGGAAUGACAGCU | 2233 |
| NO: 298 | NO: 685 | | NO: 1071 | | |
| Duplex | SEQ ID | UGUCAUUCCAGCCAAGGUUGA | SEQ ID | UCAACCUUGGCUGGAAUGACAGC | 2234 |
| NO: 299 | NO: 686 | | NO: 1072 | | |
| Duplex | SEQ ID | GUCAUUCCAGCCAAGGUUGUA | SEQ ID | UACAACCUUGGCUGGAAUGACAG | 2235 |
| NO: 300 | NO: 687 | | NO: 1073 | | |
| Duplex | SEQ ID | GCUGGGAGCAUAGGAGGCUAA | SEQ ID | UUAGCCUCCUAUGCUCCCAGCCA | 2331 |
| NO: 301 | NO: 688 | | NO: 1074 | | |
| Duplex | SEQ ID | CUGGGAGCAUAGGAGGCUACA | SEQ ID | UGUAGCCUCCUAUGCUCCCAGCC | 2332 |
| NO: 302 | NO: 689 | | NO: 1075 | | |
| Duplex | SEQ ID | GGGAGCAUAGGAGGCUACAAA | SEQ ID | UUUGUAGCCUCCUAUGCUCCCAG | 2334 |
| NO: 303 | NO: 690 | | NO: 1076 | | |
| Duplex | SEQ ID | GGAGCAUAGGAGGCUACAACA | SEQ ID | UGUUGUAGCCUCCUAUGCUCCCA | 2335 |
| NO: 304 | NO: 691 | | NO: 1077 | | |
| Duplex | SEQ ID | AGCAUAGGAGGCUACAACGCA | SEQ ID | UGCGUUGUAGCCUCCUAUGCUCC | 2337 |
| NO: 305 | NO: 692 | | NO: 1078 | | |
| Duplex | SEQ ID | GCAUAGGAGGCUACAACGCCA | SEQ ID | UGGCGUUGUAGCCUCCUAUGCUC | 2338 |
| NO: 306 | NO: 693 | | NO: 1079 | | |
| Duplex | SEQ ID | CAUAGGAGGCUACAACGCCCA | SEQ ID | UGGGCGUUGUAGCCUCCUAUGCU | 2339 |
| NO: 307 | NO: 694 | | NO: 1080 | | |
| Duplex | SEQ ID | AUAGGAGGCUACAACGCCCAA | SEQ ID | UUGGGCGUUGUAGCCUCCUAUGC | 2340 |
| NO: 308 | NO: 695 | | NO: 1081 | | |
| Duplex | SEQ ID | GAGGCUACAACGCCCAUGCAA | SEQ ID | UUGCAUGGGCGUUGUAGCCUCCU | 2344 |
| NO: 309 | NO: 696 | | NO: 1082 | | |
| Duplex | SEQ ID | GGCUACAACGCCCAUGCAGCA | SEQ ID | UGCUGCAUGGGCGUUGUAGCCUC | 2346 |
| NO: 310 | NO: 697 | | NO: 1083 | | |
| Duplex | SEQ ID | GCUACAACGCCCAUGCAGCAA | SEQ ID | UUGCUGCAUGGGCGUUGUAGCCU | 2347 |
| NO: 311 | NO: 698 | | NO: 1084 | | |
| Duplex | SEQ ID | CUACAACGCCCAUGCAGCAAA | SEQ ID | UUUGCUGCAUGGGCGUUGUAGCC | 2348 |
| NO: 312 | NO: 699 | | NO: 1085 | | |
| Duplex | SEQ ID | ACAACGCCCAUGCAGCAAACA | SEQ ID | UGUUUGCUGCAUGGGCGUUGUAG | 2350 |
| NO: 313 | NO: 700 | | NO: 1086 | | |
| Duplex | SEQ ID | CAACGCCCAUGCAGCAAACAA | SEQ ID | UUGUUUGCUGCAUGGGCGUUGUA | 2351 |
| NO: 314 | NO: 701 | | NO: 1087 | | |
| Duplex | SEQ ID | AACGCCCAUGCAGCAAACAUA | SEQ ID | UAUGUUUGCUGCAUGGGCGUUGU | 2352 |
| NO: 315 | NO: 702 | | NO: 1088 | | |
| Duplex | SEQ ID | CCCAUGCAGCAAACAUUGUCA | SEQ ID | UGACAAUGUUUGCUGCAUGGGCG | 2356 |
| NO: 316 | NO: 703 | | NO: 1089 | | |
| Duplex | SEQ ID | CUGUGGACAGGAUGCAGCACA | SEQ ID | UGUGCUGCAUCCUGUCCACAGGC | 2393 |
| NO: 317 | NO: 704 | | NO: 1090 | | |
| Duplex | SEQ ID | GGAUGCAGCACAGAAUGUUGA | SEQ ID | UCAACAUUCUGUGCUGCAUCCUG | 2402 |
| NO: 318 | NO: 705 | | NO: 1091 | | |
| Duplex | SEQ ID | UUGGUAGUUCAAACUGUAUUA | SEQ ID | UAAUACAGUUUGAACUACCAACA | 2419 |
| NO: 319 | NO: 706 | | NO: 1092 | | |
| Duplex | SEQ ID | UGGUAGUUCAAACUGUAUUAA | SEQ ID | UUAAUACAGUUUGAACUACCAAC | 2420 |
| NO: 320 | NO: 707 | | NO: 1093 | | |
| Duplex | SEQ ID | GGUAGUUCAAACUGUAUUACA | SEQ ID | UGUAAUACAGUUUGAACUACCAA | 2421 |
| NO: 321 | NO: 708 | | NO: 1094 | | |
| Duplex | SEQ ID | GUAUUACUUUAAUGGAAGCAA | SEQ ID | UUGCUUCCAUUAAAUGAAUACAG | 2434 |
| NO: 322 | NO: 709 | | NO: 1095 | | |
| Duplex | SEQ ID | UAUUACUUUAAUGGAAGCAAA | SEQ ID | UUUGCUUCCAUUAAAGUAAUACA | 2435 |
| NO: 323 | NO: 710 | | NO: 1096 | | |
| Duplex | SEQ ID | UUACUUUAAUGGAAGCAAGUA | SEQ ID | UACUUGCUUCCAUUAAAGUAAUA | 2437 |
| NO: 324 | NO: 711 | | NO: 1097 | | |
| Duplex | SEQ ID | UACUUUAAUGGAAGCAAGUGA | SEQ ID | UCACUUGCUUCCAUUAAAGUAAU | 2438 |
| NO: 325 | NO: 712 | | NO: 1098 | | |
| Duplex | SEQ ID | GUCCCACAAAUGAAGAUUUAA | SEQ ID | UUAAAUCUUCAUUUGUGGGACCA | 2458 |
| NO: 326 | NO: 713 | | NO: 1099 | | |
| Duplex | SEQ ID | AAGAUUUAUAUAUCAGCUGCA | SEQ ID | UGCAGCUGAUAUAUAAAUCUUCA | 2470 |
| NO: 327 | NO: 714 | | NO: 1100 | | |
| Duplex | SEQ ID | UCAGCUGCACCAUGCCAUCUA | SEQ ID | UAGAUGGCAUGGUGCAGCUGAUA | 2482 |
| NO: 328 | NO: 715 | | NO: 1101 | | |
| Duplex | SEQ ID | CAGCUGCACCAUGCCAUCUAA | SEQ ID | UUAGAUGGCAUGGUGCAGCUGAU | 2483 |
| NO: 329 | NO: 716 | | NO: 1102 | | |
| Duplex | SEQ ID | AGCUGCACCAUGCCAUCUAUA | SEQ ID | UAUAGAUGGCAUGGUGCAGCUGA | 2484 |
| NO: 330 | NO: 717 | | NO: 1103 | | |
| Duplex | SEQ ID | GCUGCACCAUGCCAUCUAUAA | SEQ ID | UUAUAGAUGGCAUGGUGCAGCUG | 2485 |
| NO: 331 | NO: 718 | | NO: 1104 | | |
| Duplex | SEQ ID | CUGCACCAUGCCAUCUAUAGA | SEQ ID | UCUAUAGAUGGCAUGGUGCAGCU | 2486 |
| NO: 332 | NO: 719 | | NO: 1105 | | |
| Duplex | SEQ ID | UGCACCAUGCCAUCUAUAGAA | SEQ ID | UUCUAUAGAUGGCAUGGUGCAGC | 2487 |
| NO: 333 | NO: 720 | | NO: 1106 | | |
| Duplex | SEQ ID | GCACCAUGCCAUCUAUAGAGA | SEQ ID | UCUCUAUAGAUGGCAUGGUGCAG | 2488 |
| NO: 334 | NO: 721 | | NO: 1107 | | |
| Duplex | SEQ ID | CACCAUGCCAUCUAUAGAGAA | SEQ ID | UUCUCUAUAGAUGGCAUGGUGCA | 2489 |
| NO: 335 | NO: 722 | | NO: 1108 | | |
| Duplex | SEQ ID | AUGCCAUCUAUAGAGAUAGGA | SEQ ID | UCCUAUCUCUAUAGAUGGCAUGG | 2493 |
| NO: 336 | NO: 723 | | NO: 1109 | | |
| Duplex | SEQ ID | CUAUAGAGAUAGGAACGGUGA | SEQ ID | UCACCGUUCCUAUCUCUAUAGAU | 2500 |
| NO: 337 | NO: 724 | | NO: 1110 | | |
| Duplex | SEQ ID | UAUAGAGAUAGGAACGGUGGA | SEQ ID | UCCACCGUUCCUAUCUCUAUAGA | 2501 |
| NO: 338 | NO: 725 | | NO: 1111 | | |
| Duplex | SEQ ID | AUAGAGAUAGGAACGGUGGGA | SEQ ID | UCCCACCGUUCCUAUCUCUAUAG | 2502 |
| NO: 339 | NO: 726 | | NO: 1112 | | |
| Duplex | SEQ ID | UACUACCUCAGCAAGCCUGUA | SEQ ID | UACAGGCUUGCUGAGGUAGUAGG | 2536 |
| NO: 340 | NO: 727 | | NO: 1113 | | |
| Duplex | SEQ ID | GUUUGCAGAUGCUAGGUGUUA | SEQ ID | UAACACCUAGCAUCUGCAAACAG | 2554 |
| NO: 341 | NO: 728 | | NO: 1114 | | |
| Duplex | SEQ ID | UUCAAGGAGCAUGCAAAGAUA | SEQ ID | UAUCUUUGCAUGCUCCUUGAACA | 2572 |
| NO: 342 | NO: 729 | | NO: 1115 | | |
| Duplex | SEQ ID | UCAAGGAGCAUGCAAAGAUAA | SEQ ID | UUAUCUUUGCAUGCUCCUUGAAC | 2573 |
| NO: 343 | NO: 730 | | NO: 1116 | | |
| Duplex | SEQ ID | CAAGGAGCAUGCAAAGAUAAA | SEQ ID | UUUAUCUUUGCAUGCUCCUUGAA | 2574 |
| NO: 344 | NO: 731 | | NO: 1117 | | |
| Duplex | SEQ ID | AAGGAGCAUGCAAAGAUAAUA | SEQ ID | UAUUAUCUUUGCAUGCUCCUUGA | 2575 |
| NO: 345 | NO: 732 | | NO: 1118 | | |
| Duplex | SEQ ID | AGGAGCAUGCAAAGAUAAUCA | SEQ ID | UGAUUAUCUUUGCAUGCUCCUUG | 2576 |
| NO: 346 | NO: 733 | | NO: 1119 | | |
| Duplex | SEQ ID | GGAGCAUGCAAAGAUAAUCCA | SEQ ID | UGGAUUAUCUUUGCAUGCUCCUU | 2577 |
| NO: 347 | NO: 734 | | NO: 1120 | | |
| Duplex | SEQ ID | UGCCCGGCAGCUUGCCCGAAA | SEQ ID | UUUCGGGCAAGCUGCCGGGCAUU | 2606 |
| NO: 348 | NO: 735 | | NO: 1121 | | |
| Duplex | SEQ ID | GGCAGCUUGCCCGAAUUGUGA | SEQ ID | UCACAAUUCGGGCAAGCUGCCGG | 2611 |
| NO: 349 | NO: 736 | | NO: 1122 | | |
| Duplex | SEQ ID | GCAGCUUGCCCGAAUUGUGUA | SEQ ID | UACACAAUUCGGGCAAGCUGCCG | 2612 |
| NO: 350 | NO: 737 | | NO: 1123 | | |
| Duplex | SEQ ID | CAGCUUGCCCGAAUUGUGUGA | SEQ ID | UCACACAAUUCGGGCAAGCUGCC | 2613 |
| NO: 351 | NO: 738 | | NO: 1124 | | |
| Duplex | SEQ ID | GGCAGCAUUGGCAGCAGGACA | SEQ ID | UGUCCUGCUGCCAAUGCUGCCAU | 2666 |
| NO: 352 | NO: 739 | | NO: 1125 | | |
| Duplex | SEQ ID | GCAGCAUUGGCAGCAGGACAA | SEQ ID | UUGUCCUGCUGCCAAUGCUGCCA | 2667 |
| NO: 353 | NO: 740 | | NO: 1126 | | |
| Duplex | SEQ ID | CAGCAUUGGCAGCAGGACAUA | SEQ ID | UAUGUCCUGCUGCCAAUGCUGCC | 2668 |
| NO: 354 | NO: 741 | | NO: 1127 | | |
| Duplex | SEQ ID | CAGCAGGACAUCUUGUCAAAA | SEQ ID | UUUUGACAAGAUGUCCUGCUGCC | 2677 |
| NO: 355 | NO: 742 | | NO: 1128 | | |
| Duplex | SEQ ID | AGCAGGACAUCUUGUCAAAAA | SEQ ID | UUUUUGACAAGAUGUCCUGCUGC | 2678 |
| NO: 356 | NO: 743 | | NO: 1129 | | |
| Duplex | SEQ ID | CAGGACAUCUUGUCAAAAGUA | SEQ ID | UACUUUUGACAAGAUGUCCUGCU | 2680 |
| NO: 357 | NO: 744 | | NO: 1130 | | |
| Duplex | SEQ ID | AGGACAUCUUGUCAAAAGUCA | SEQ ID | UGACUUUUGACAAGAUGUCCUGC | 2681 |
| NO: 358 | NO: 745 | | NO: 1131 | | |
| Duplex | SEQ ID | GGACAUCUUGUCAAAAGUCAA | SEQ ID | UUGACUUUUGACAAGAUGUCCUG | 2682 |
| NO: 359 | NO: 746 | | NO: 1132 | | |
| Duplex | SEQ ID | UAAGUCUGGGAUGUAGAACUA | SEQ ID | UAGUUCUACAUCCCAGACUUAAU | 3215 |
| NO: 360 | NO: 747 | | NO: 1133 | | |
| Duplex | SEQ ID | GCUAUUUGUUCAGAGAGGCCA | SEQ ID | UGGCCUCUCUGAACAAAUAGCCU | 3454 |
| NO: 361 | NO: 748 | | NO: 1134 | | |
| Duplex | SEQ ID | CUAUUUGUUCAGAGAGGCCUA | SEQ ID | UAGGCCUCUCUGAACAAAUAGCC | 3455 |
| NO: 362 | NO: 749 | | NO: 1135 | | |
| Duplex | SEQ ID | UUGGAAGUGUUCAAGAAAUAA | SEQ ID | UUAUUUCUUGAACACUUCCAAUA | 3806 |
| NO: 363 | NO: 750 | | NO: 1136 | | |
| Duplex | SEQ ID | UGGAAGUGUUCAAGAAAUAAA | SEQ ID | UUUAUUUCUUGAACACUUCCAAU | 3807 |
| NO: 364 | NO: 751 | | NO: 1137 | | |
| Duplex | SEQ ID | UGUACUGAUAAAAUACUCUAA | SEQ ID | UUAGAGUAUUUUAUCAGUACACA | 3838 |
| NO: 365 | NO: 752 | | NO: 1138 | | |
| Duplex | SEQ ID | AGGAAACCCUGGCUUGCUUGA | SEQ ID | UCAAGCAAGCCAGGGUUUCCUGG | 3896 |
| NO: 366 | NO: 753 | | NO: 1139 | | |
| Duplex | SEQ ID | GUGCCUAGUUCCUGUGGCCAA | SEQ ID | UUGGCCACAGGAACUAGGCACAG | 3985 |
| NO: 367 | NO: 754 | | NO: 1140 | | |
| Duplex | SEQ ID | GUUCCUGUGGCCAGGAGGUUA | SEQ ID | UAACCUCCUGGCCACAGGAACUA | 3992 |
| NO: 368 | NO: 755 | | NO: 1141 | | |
| Duplex | SEQ ID | CUGUGGCCAGGAGGUUGGUGA | SEQ ID | UCACCAACCUCCUGGCCACAGGA | 3996 |
| NO: 369 | NO: 756 | | NO: 1142 | | |
| Duplex | SEQ ID | GCCAGGAGGUUGGUGACUGAA | SEQ ID | UUCAGUCACCAACCUCCUGGCCA | 4001 |
| NO: 370 | NO: 757 | | NO: 1143 | | |
| Duplex | SEQ ID | CAGAGUUAUUGAAUCUUAAUA | SEQ ID | UAUUAAGAUUCAAUAACUCUGCU | 4082 |
| NO: 371 | NO: 758 | | NO: 1144 | | |
| Duplex | SEQ ID | AGAGUUAUUGAAUCUUAAUUA | SEQ ID | UAAUUAAGAUUCAAUAACUCUGC | 4083 |
| NO: 372 | NO: 759 | | NO: 1145 | | |
| Duplex | SEQ ID | GAGUUAUUGAAUCUUAAUUUA | SEQ ID | UAAAUUAAGAUUCAAUAACUCUG | 4084 |
| NO: 373 | NO: 760 | | NO: 1146 | | |
| Duplex | SEQ ID | UUUUUAAUGUACAAGUUUUGA | SEQ ID | UCAAAACUUGUACAUUAAAAAAA | 4104 |
| NO: 374 | NO: 761 | | NO: 1147 | | |
| Duplex | SEQ ID | UUUAAUGUACAAGUUUUGUAA | SEQ ID | UUACAAAACUUGUACAUUAAAAA | 4106 |
| NO: 375 | NO: 762 | | NO: 1148 | | |
| Duplex | SEQ ID | AAAUAAUAAAGAACUCCUUAA | SEQ ID | UUAAGGAGUUCUUUAUUAUUUAU | 4127 |
| NO: 376 | NO: 763 | | NO: 1149 | | |
| Duplex | SEQ ID | AAUAAUAAAGAACUCCUUAUA | SEQ ID | UAUAAGGAGUUCUUUAUUAUUUA | 4128 |
| NO: 377 | NO: 764 | | NO: 1150 | | |
| Duplex | SEQ ID | AUAAUAAAGAACUCCUUAUUA | SEQ ID | UAAUAAGGAGUUCUUUAUUAUUU | 4129 |
| NO: 378 | NO: 765 | | NO: 1151 | | |
| Duplex | SEQ ID | UAAUAAAGAACUCCUUAUUUA | SEQ ID | UAAAUAAGGAGUUCUUUAUUAUU | 4130 |
| NO: 379 | NO: 766 | | NO: 1152 | | |
| Duplex | SEQ ID | AAUAAAGAACUCCUUAUUUUA | SEQ ID | UAAAAUAAGGAGUUCUUUAUUAU | 4131 |
| NO: 380 | NO: 767 | | NO: 1153 | | |
| Duplex | SEQ ID | ACAUCUAAUGCUUCAAGUGUA | SEQ ID | UACACUUGAAGCAUUAGAUGUAA | 4156 |
| NO: 381 | NO: 768 | | NO: 1154 | | |
| Duplex | SEQ ID | UCUGAGCUUUUCAUGGAAGUA | SEQ ID | UACUUCCAUGAAAAGCUCAGAAA | 4360 |
| NO: 382 | NO: 769 | | NO: 1155 | | |
| Duplex | SEQ ID | UGAGCUUUUCAUGGAAGUGGA | SEQ ID | UCCACUUCCAUGAAAAGCUCAGA | 4362 |
| NO: 383 | NO: 770 | | NO: 1156 | | |
| Duplex | SEQ ID | AGCUUUUCAUGGAAGUGGCAA | SEQ ID | UUGCCACUUCCAUGAAAAGCUCA | 4364 |
| NO: 384 | NO: 771 | | NO: 1157 | | |
| Duplex | SEQ ID | UUCAUGGAAGUGGCAGUGAAA | SEQ ID | UUUCACUGCCACUUCCAUGAAAA | 4369 |
| NO: 385 | NO: 772 | | NO: 1158 | | |
| Duplex | SEQ ID | UUAAUGUUUUGUACAAUUACA | SEQ ID | UGUAAUUGUACAAAACAUUAAUC | 4438 |
| NO: 386 | NO: 773 | | NO: 1159 | | |

TABLE 4A
HMGCR-GalNAc RNAi agents, modified sense and antisense strands

| Duplex NO: | SEQ ID NO: | Modified Sequence |
|---|---|---|
| Duplex NO: 387 | SEQ ID NO: 1160 | mG*mC*mUmAmCmAmAmUfGfUfUmGmUmCmAmAmGmAmC*mU*mA |
| | SEQ ID NO: 1161 | PmU*fA*mGmUfCmUfUmGmAmCmAmAmCfAmUfUmGmUmAmGmC*mU*mA |
| Duplex NO: 388 | SEQ ID NO: 1162 | mC*mU*mAmCmAmAmUmGfUfUfGmUmCmAmAmGmAmCmU*mU*mA |
| | SEQ ID NO: 1163 | PmU*fA*mAmGfUmCfUmUmGmAmCmAmAfCmAfUmUmGmUmAmG*mC*mU |
| Duplex NO: 389 | SEQ ID NO: 1164 | mA*mU*mGmAmUmGmUmCfCfAfUmGmAmAmCmAmUmGmU*mU*mA |
| | SEQ ID NO: 1165 | PmU*fA*mAmCfAmUfGmUmUmCmAmUmGfGmAfCmAmUmCmAmU*mG*mC |
| Duplex NO: 390 | SEQ ID NO: 1166 | mA*mU*mAmUmUmUmAmCfUfUfCmCmAmGmUmUmCmCmA*mG*mA |
| | SEQ ID NO: 1167 | PmU*fC*mUmGfGmAfAmCmUmGmGmAmAfGmUfAmAmAmUmAmU*mA*mC |
| Duplex NO: 391 | SEQ ID NO: 1168 | mA*mU*mUmUmAmCmUmUfCfCfAmGmUmUmCmCmAmGmA*mA*mA |
| | SEQ ID NO: 1169 | PmU*fU*mUmCfUmGfGmAmAmCmUmGmGfAmAfGmUmAmAmAmU*mA*mU |
| Duplex NO: 392 | SEQ ID NO: 1170 | mA*mA*mUmGmAmAmGmCfUfUfUmGmCmCmCmUmUmUmU*mU*mA |
| | SEQ ID NO: 1171 | PmU*fA*mAmAfAmAfGmGmGmCmAmAmAfGmCfUmUmCmAmUmU*mC*mA |
| Duplex NO: 393 | SEQ ID NO: 1172 | mC*mA*mCmAmUmUmAmGfCfAfAmAmGmUmUmUmGmCmC*mC*mA |
| | SEQ ID NO: 1173 | PmU*fG*mGmGfCmAfAmAmCmUmUmUmGfCmUfAmAmUmGmUmG*mC*mU |
| Duplex NO: 394 | SEQ ID NO: 1174 | mA*mC*mAmUmUmAmGmCfAfAfAmGmUmUmUmGmCmCmC*mU*mA |
| | SEQ ID NO: 1175 | PmU*fA*mGmGfGmCfAmAmAmCmUmUmUfGmCfUmAmAmUmGmU*mG*mC |
| Duplex NO: 395 | SEQ ID NO: 1176 | mC*mA*mUmUmAmGmCmAfAfAfGmUmUmUmGmCmCmCmU*mC*mA |
| | SEQ ID NO: 1177 | PmU*fG*mAmGfGmGfCmAmAmAmCmUmUfUmGfCmUmAmAmUmG*mU*mG |
| Duplex NO: 396 | SEQ ID NO: 1178 | mU*mA*mGmCmAmAmAmGfUfUfUmGmCmCmCmUmCmAmG*mU*mA |
| | SEQ ID NO: 1179 | PmU*fA*mCmUfGmAfGmGmGmCmAmAmAfCmUfUmUmGmCmUmA*mA*mU |
| Duplex NO: 397 | SEQ ID NO: 1180 | mG*mC*mAmAmAmGmUmUfUfGfCmCmCmUmCmAmGmUmU*mC*mA |
| | SEQ ID NO: 1181 | PmU*fG*mAmAfCmUfGmAmGmGmGmCmAfAmAfCmUmUmUmGmC*mU*mA |
| Duplex NO: 398 | SEQ ID NO: 1182 | mA*mC*mUmCmAmCmAmGfGfAfUmGmAmAmGmUmAmAmG*mG*mA |
| | SEQ ID NO: 1183 | PmU*fC*mCmUfUmAfCmUmUmCmAmUmCfCmUfGmUmGmAmGmU*mU*mG |
| Duplex NO: 399 | SEQ ID NO: 1184 | mC*mA*mCmAmGmGmAmUfGfAfAmGmUmAmAmGmGmGmA*mA*mA |
| | SEQ ID NO: 1185 | PmU*fU*mUmCfCmCfUmUmAmCmUmUmCfAmUfCmCmUmGmUmG*mA*mG |
| Duplex NO: 400 | SEQ ID NO: 1186 | mC*mA*mGmGmAmUmGmAfAfGfUmAmAmGmGmGmAmAmA*mA*mA |
| | SEQ ID NO: 1187 | PmU*fU*mUmUfUmCfCmCmUmUmAmCmUfUmCfAmUmCmCmUmG*mU*mG |
| Duplex NO: 401 | SEQ ID NO: 1188 | mA*mG*mGmAmUmGmAmAfGfUfAmAmGmGmGmAmAmAmA*mU*mA |
| | SEQ ID NO: 1189 | PmU*fA*mUmUfUmUfCmCmCmUmUmAmCfUmUfCmAmUmCmCmU*mG*mU |
| Duplex NO: 402 | SEQ ID NO: 1190 | mG*mC*mGmAmGmGmGmUfCfGfUmCmCmAmAmUmUmUmG*mG*mA |
| | SEQ ID NO: 1191 | PmU*fC*mCmAfAmAfUmUmGmGmAmCmGfAmCfCmCmUmCmGmC*mG*mG |
| Duplex NO: 403 | SEQ ID NO: 1192 | mC*mG*mAmGmGmGmUmCfGfUfCmCmAmAmUmUmUmGmG*mC*mA |
| | SEQ ID NO: 1193 | PmU*fG*mCmCfAmAfAmUmUmGmGmAmCfGmAfCmCmCmUmCmG*mC*mG |
| Duplex NO: 404 | SEQ ID NO: 1194 | mG*mA*mGmGmGmUmCmGfUfCfCmAmAmUmUmUmGmGmC*mA*mA |
| | SEQ ID NO: 1195 | PmU*fU*mGmCfCmAfAmAmUmUmGmGmAfCmGfAmCmCmCmUmC*mG*mC |
| Duplex NO: 405 | SEQ ID NO: 1196 | mG*mU*mCmGmUmCmCmAfAfUfUmUmGmGmCmAmGmCmU*mC*mA |
| | SEQ ID NO: 1197 | PmU*fG*mAmGfCmUfGmCmCmAmAmAmUfUmGfGmAmCmGmAmC*mC*mC |
| Duplex NO: 406 | SEQ ID NO: 1198 | mU*mC*mGmUmCmCmAmAfUfUfUmGmGmCmAmGmCmUmC*mA*mA |
| | SEQ ID NO: 1199 | PmU*fU*mGmAfGmCfUmGmCmCmAmAmAfUmUfGmGmAmCmGmA*mC*mC |
| Duplex NO: 407 | SEQ ID NO: 1200 | mC*mG*mUmCmCmAmAmUfUfUfGmGmCmAmGmCmUmCmA*mG*mA |
| | SEQ ID NO: 1201 | PmU*fC*mUmGfAmGfCmUmGmCmCmAmAfAmUfUmGmGmAmCmG*mA*mC |
| Duplex NO: 408 | SEQ ID NO: 1202 | mU*mC*mCmAmAmUmUmUfGfGfCmAmGmCmUmCmAmGmC*mC*mA |
| | SEQ ID NO: 1203 | PmU*fG*mGmCfUmGfAmGmCmUmGmCmCfAmAfAmUmUmGmGmA*mC*mG |
| Duplex NO: 409 | SEQ ID NO: 1204 | mA*mA*mUmUmUmGmGmCfAfGfCmUmCmAmGmCmCmAmU*mU*mA |
| | SEQ ID NO: 1205 | PmU*fA*mAmUfGmGfCmUmGmAmGmCmUfGmCfCmAmAmAmUmU*mG*mG |
| Duplex NO: 410 | SEQ ID NO: 1206 | mU*mU*mGmGmCmAmGmCfUfCfAmGmCmCmAmUmUmUmU*mG*mA |
| | SEQ ID NO: 1207 | PmU*fC*mAmAfAmAfUmGmGmCmUmGmAfGmCfUmGmCmCmAmA*mA*mU |
| Duplex NO: 411 | SEQ ID NO: 1208 | mU*mG*mGmCmAmGmCmUfCfAfGmCmCmAmUmUmUmUmG*mC*mA |
| | SEQ ID NO: 1209 | PmU*fG*mCmAfAmAfAmUmGmGmCmUmGfAmGfCmUmGmCmCmA*mA*mA |
| Duplex NO: 412 | SEQ ID NO: 1210 | mC*mC*mGmAmGmUmUmUfUfAfGmAmAmGmAmAmGmAmA*mG*mA |
| | SEQ ID NO: 1211 | PmU*fC*mUmUfCmUfUmCmUmUmCmUmAfAmAfAmCmUmCmGmG*mG*mC |
| Duplex NO: 413 | SEQ ID NO: 1212 | mA*mG*mAmGmGmGmUmCfAfAfGmAmUmGmAmUmUmAmU*mG*mA |
| | SEQ ID NO: 1213 | PmU*fC*mAmUfAmAfUmCmAmUmCmUmUfGmAfCmCmCmUmCmU*mG*mA |
| Duplex NO: 414 | SEQ ID NO: 1214 | mG*mG*mGmUmCmAmAmGfAfUfGmAmUmUmAmUmGmUmC*mU*mA |
| | SEQ ID NO: 1215 | PmU*fA*mGmAfCmAfUmAmAmUmCmAmUfCmUfUmGmAmCmCmC*mU*mC |
| Duplex NO: 415 | SEQ ID NO: 1216 | mA*mG*mUmCmGmCmUmGfGfAfUmAmGmCmUmGmAmUmC*mC*mA |
| | SEQ ID NO: 1217 | PmU*fG*mGmAfUmCfAmGmCmUmAmUmCfCmAfGmCmGmAmCmU*mG*mU |
| Duplex NO: 416 | SEQ ID NO: 1218 | mG*mU*mCmGmCmUmGmGfAfUfAmGmCmUmGmAmUmCmC*mU*mA |
| | SEQ ID NO: 1219 | PmU*fA*mGmGfAmUfCmAmGmCmUmAmUfCmCfAmGmCmGmAmC*mU*mG |
| Duplex NO: 417 | SEQ ID NO: 1220 | mU*mC*mGmCmUmGmGmAfUfAfGmCmUmGmAmUmCmCmU*mU*mA |
| | SEQ ID NO: 1221 | PmU*fA*mAmGfGmAfUmCmAmGmCmUmAfUmCfCmAmGmCmGmA*mC*mU |
| Duplex NO: 418 | SEQ ID NO: 1222 | mA*mA*mAmAmGmUmUmGfAfGfGmUmUmAmUmAmAmAmA*mC*mA |
| | SEQ ID NO: 1223 | PmU*fG*mUmUfUmUfAmUmAmAmCmCmUfCmAfAmCmUmUmUmU*mC*mU |
| Duplex NO: 419 | SEQ ID NO: 1224 | mA*mA*mAmGmUmUmGmAfGfGfUmUmAmUmAmAmAmAmC*mC*mA |
| | SEQ ID NO: 1225 | PmU*fG*mGmUfUmUfUmAmUmAmAmCmCfUmCfAmAmCmUmUmU*mU*mC |
| Duplex NO: 420 | SEQ ID NO: 1226 | mU*mG*mGmAmUmAmUmAfUfGfCmCmCmAmUmCmCmCmU*mG*mA |
| | SEQ ID NO: 1227 | PmU*fC*mAmGfGmGfAmUmGmGmGmCmAfUmAfUmAmUmCmCmA*mA*mU |
| Duplex NO: 421 | SEQ ID NO: 1228 | mG*mG*mAmUmAmUmAmUfGfCfCmCmAmUmCmCmCmUmG*mU*mA |
| | SEQ ID NO: 1229 | PmU*fA*mCmAfGmGfGmAmUmGmGmGmCfAmUfAmUmAmUmCmC*mA*mA |
| Duplex NO: 422 | SEQ ID NO: 1230 | mA*mU*mAmUmAmUmGmCfCfCfAmUmCmCmCmUmGmUmU*mG*mA |
| | SEQ ID NO: 1231 | PmU*fC*mAmAfCmAfGmGmGmAmUmGmGfGmCfAmUmAmUmAmU*mC*mC |
| Duplex NO: 423 | SEQ ID NO: 1232 | mU*mA*mUmAmUmGmCmCfCfAfUmCmCmCmUmGmUmUmG*mG*mA |
| | SEQ ID NO: 1233 | PmU*fC*mCmAfAmCfAmGmGmGmAmUmGfGmGfCmAmUmAmUmA*mU*mC |
| Duplex NO: 424 | SEQ ID NO: 1234 | mA*mU*mAmUmGmCmCmCfAfUfCmCmCmUmGmUmUmGmG*mA*mA |
| | SEQ ID NO: 1235 | PmU*fU*mCmCfAmAfCmAmGmGmGmAmUfGmGfGmCmAmUmAmU*mA*mU |
| Duplex NO: 425 | SEQ ID NO: 1236 | mU*mA*mUmGmCmCmCmAfUfCfCmCmUmGmUmUmGmGmA*mG*mA |
| | SEQ ID NO: 1237 | PmU*fC*mUmCfCmAfAmCmAmGmGmGmAfUmGfGmGmCmAmUmA*mU*mA |
| Duplex NO: 426 | SEQ ID NO: 1238 | mG*mG*mUmGmGmAmGmGfUfGfCmCmAmGmCmAmGmCmC*mG*mA |
| | SEQ ID NO: 1239 | PmU*fC*mGmGfCmUfGmCmUmGmGmCmAfCmCfUmCmCmAmCmC*mA*mA |
| Duplex NO: 427 | SEQ ID NO: 1240 | mG*mU*mCmCmUmUmGmCfAfGfAmUmGmGmGmAmUmGmA*mC*mA |
| | SEQ ID NO: 1241 | PmU*fG*mUmCfAmUfCmCmCmAmUmCmUfGmCfAmAmGmGmAmC*mU*mC |
| Duplex NO: 428 | SEQ ID NO: 1242 | mU*mC*mCmUmUmGmCmAfGfAfUmGmGmGmAmUmGmAmC*mU*mA |
| | SEQ ID NO: 1243 | PmU*fA*mGmUfCmAfUmCmCmCmAmUmCfUmGfCmAmAmGmGmA*mC*mU |
| Duplex NO: 429 | SEQ ID NO: 1244 | mC*mU*mUmGmCmAmGmAfUfGfGmGmAmUmGmAmCmUmC*mG*mA |
| | SEQ ID NO: 1245 | PmU*fC*mGmAfGmUfCmAmUmCmCmCmAfUmCfUmGmCmAmAmG*mG*mA |
| Duplex NO: 430 | SEQ ID NO: 1246 | mU*mG*mCmGmUmCmUmUfCfCfAmCmGmUmGmCmUmUmG*mU*mA |
| | SEQ ID NO: 1247 | PmU*fA*mCmAfAmGfCmAmCmGmUmGmGfAmAfGmAmCmGmCmA*mC*mA |
| Duplex NO: 431 | SEQ ID NO: 1248 | mG*mC*mGmUmCmUmUmCfCfAfCmGmUmGmCmUmUmGmU*mG*mA |
| | SEQ ID NO: 1249 | PmU*fC*mAmCfAmAfGmCmAmCmGmUmGfGmAfAmGmAmCmGmC*mA*mC |
| Duplex NO: 432 | SEQ ID NO: 1250 | mG*mU*mCmUmUmCmCmAfCfGfUmGmCmUmUmGmUmGmA*mC*mA |
| | SEQ ID NO: 1251 | PmU*fG*mUmCfAmCfAmAmGmCmAmCmGfUmGfGmAmAmGmAmC*mG*mC |
| Duplex NO: 433 | SEQ ID NO: 1252 | mC*mA*mCmGmUmGmCmUfUfGfUmGmAmCmUmCmUmGmC*mA*mA |
| | SEQ ID NO: 1253 | PmU*fU*mGmCfAmGfAmGmUmCmAmCmAfAmGfCmAmCmGmUmG*mG*mA |
| Duplex NO: 434 | SEQ ID NO: 1254 | mU*mG*mCmUmUmGmUmGfAfCfUmCmUmGmCmAmGmAmA*mG*mA |
| | SEQ ID NO: 1255 | PmU*fC*mUmUfCmUfGmCmAmGmAmGmUfCmAfCmAmAmGmCmA*mC*mG |
| Duplex NO: 435 | SEQ ID NO: 1256 | mU*mU*mUmAmUmAmUmCfCfGfUmUmUmCmCmAmGmUmC*mC*mA |
| | SEQ ID NO: 1257 | PmU*fG*mGmAfCmUfGmGmAmAmAmCmGfGmAfUmAmUmAmAmA*mG*mG |
| Duplex NO: 436 | SEQ ID NO: 1258 | mU*mU*mAmUmAmUmCmCfGfUfUmUmCmCmAmGmUmCmC*mA*mA |
| | SEQ ID NO: 1259 | PmU*fU*mGmGfAmCfUmGmGmAmAmAmCfGmGfAmUmAmUmAmA*mA*mG |
| Duplex NO: 437 | SEQ ID NO: 1260 | mA*mU*mAmUmCmCmGmUfUfUfCmCmAmGmUmCmCmAmG*mG*mA |
| | SEQ ID NO: 1261 | PmU*fC*mCmUfGmGfAmCmUmGmGmAmAfAmCfGmGmAmUmAmU*mA*mA |
| Duplex NO: 438 | SEQ ID NO: 1262 | mC*mU*mGmCmCmAmUmGfGfCfUmGmGmGmAmGmCmAmU*mA*mA |
| | SEQ ID NO: 1263 | PmU*fU*mAmUfGmCfUmCmCmCmAmGmCfCmAfUmGmGmCmAmG*mA*mG |
| Duplex NO: 439 | SEQ ID NO: 1264 | mU*mG*mCmCmAmUmGmGfCfUfGmGmGmAmGmCmAmUmA*mG*mA |
| | SEQ ID NO: 1265 | PmU*fC*mUmAfUmGfCmUmCmCmCmAmGfCmCfAmUmGmGmCmA*mG*mA |
| Duplex NO: 440 | SEQ ID NO: 1266 | mG*mC*mCmAmUmGmGmCfUfGfGmGmAmGmCmAmUmAmG*mG*mA |
| | SEQ ID NO: 1267 | PmU*fC*mCmUfAmUfGmCmUmCmCmCmAfGmCfCmAmUmGmGmC*mA*mG |
| Duplex NO: 441 | SEQ ID NO: 1268 | mA*mC*mAmGmGmAmUmGfCfAfGmCmAmCmAmGmAmAmU*mG*mA |
| | SEQ ID NO: 1269 | PmU*fC*mAmUfUmCfUmGmUmGmCmUmGfCmAfUmCmCmUmGmU*mC*mC |
| Duplex NO: 442 | SEQ ID NO: 1270 | mG*mU*mAmGmUmUmCmAfAfAfCmUmGmUmAmUmUmAmC*mU*mA |
| | SEQ ID NO: 1271 | PmU*fA*mGmUfAmAfUmAmCmAmGmUmUfUmGfAmAmCmUmAmC*mC*mA |
| Duplex NO: 443 | SEQ ID NO: 1272 | mG*mU*mUmCmAmAmAmCfUfGfUmAmUmUmAmCmUmUmU*mA*mA |
| | SEQ ID NO: 1273 | PmU*fU*mAmAfAmGfUmAmAmUmAmCmAfGmUfUmUmGmAmAmC*mU*mA |
| Duplex NO: 444 | SEQ ID NO: 1274 | mU*mU*mCmAmAmAmCmUfGfUfAmUmUmAmCmUmUmUmA*mA*mA |
| | SEQ ID NO: 1275 | PmU*fU*mUmAfAmAfGmUmAmAmUmAmCfAmGfUmUmUmGmAmA*mC*mU |
| Duplex NO: 445 | SEQ ID NO: 1276 | mU*mC*mAmAmAmCmUmGfUfAfUmUmAmCmUmUmUmAmA*mU*mA |
| | SEQ ID NO: 1277 | PmU*fA*mUmUfAmAfAmGmUmAmAmUmAfCmAfGmUmUmUmGmA*mA*mC |
| Duplex NO: 446 | SEQ ID NO: 1278 | mA*mA*mCmUmGmUmAmUfUfAfCmUmUmUmAmAmUmGmG*mA*mA |
| | SEQ ID NO: 1279 | PmU*fU*mCmCfAmUfUmAmAmAmGmUmAfAmUfAmCmAmGmUmU*mU*mG |
| Duplex NO: 447 | SEQ ID NO: 1280 | mA*mC*mUmGmUmAmUmUfAfCfUmUmUmAmAmUmGmGmA*mA*mA |
| | SEQ ID NO: 1281 | PmU*fU*mUmCfCmAfUmUmAmAmAmGmUfAmAfUmAmCmAmGmU*mU*mU |
| Duplex NO: 448 | SEQ ID NO: 1282 | mC*mU*mGmUmAmUmUmAfCfUfUmUmAmAmUmGmGmAmA*mG*mA |
| | SEQ ID NO: 1283 | PmU*fC*mUmUfCmCfAmUmUmAmAmAmGfUmAfAmUmAmCmAmG*mU*mU |
| Duplex NO: 449 | SEQ ID NO: 1284 | mU*mG*mUmAmUmUmAmCfUfUfUmAmAmUmGmGmAmAmG*mC*mA |
| | SEQ ID NO: 1285 | PmU*fG*mCmUfUmCfCmAmUmUmAmAmAfGmUfAmAmUmAmCmA*mG*mU |
| Duplex NO: 450 | SEQ ID NO: 1286 | mU*mU*mAmUmAmUmAmUfCfAfGmCmUmGmCmAmCmCmA*mU*mA |
| | SEQ ID NO: 1287 | PmU*fA*mUmGfGmUfGmCmAmGmCmUmGfAmUfAmUmAmUmAmA*mA*mU |
| Duplex NO: 451 | SEQ ID NO: 1288 | mU*mA*mUmAmUmAmUmCfAfGfCmUmGmCmAmCmCmAmU*mG*mA |
| | SEQ ID NO: 1289 | PmU*fC*mAmUfGmGfUmGmCmAmGmCmUfGmAfUmAmUmAmUmA*mA*mA |
| Duplex NO: 452 | SEQ ID NO: 1290 | mA*mU*mAmUmAmUmCmAfGfCfUmGmCmAmCmCmAmUmG*mC*mA |
| | SEQ ID NO: 1291 | PmU*fG*mCmAfUmGfGmUmGmCmAmGmCfUmGfAmUmAmUmAmU*mA*mA |
| Duplex NO: 453 | SEQ ID NO: 1292 | mU*mA*mUmAmUmCmAmGfCfUfGmCmAmCmCmAmUmGmC*mC*mA |
| | SEQ ID NO: 1293 | PmU*fG*mGmCfAmUfGmGmUmGmCmAmGfCmUfGmAmUmAmUmA*mU*mA |
| Duplex NO: 454 | SEQ ID NO: 1294 | mA*mU*mAmUmCmAmGmCfUfGfCmAmCmCmAmUmGmCmC*mA*mA |
| | SEQ ID NO: 1295 | PmU*fU*mGmGfCmAfUmGmGmUmGmCmAfGmCfUmGmAmUmAmU*mA*mU |
| Duplex NO: 455 | SEQ ID NO: 1296 | mA*mU*mCmAmGmCmUmGfCfAfCmCmAmUmGmCmCmAmU*mC*mA |
| | SEQ ID NO: 1297 | PmU*fG*mAmUfGmGfCmAmUmGmGmUmGfCmAfGmCmUmGmAmU*mA*mU |
| Duplex NO: 456 | SEQ ID NO: 1298 | mU*mU*mUmGmCmAmGmAfUfGfCmUmAmGmGmUmGmUmU*mC*mA |
| | SEQ ID NO: 1299 | PmU*fG*mAmAfCmAfCmCmUmAmGmCmAfUmCfUmGmCmAmAmA*mC*mA |
| Duplex NO: 457 | SEQ ID NO: 1300 | mU*mG*mCmAmGmAmUmGfCfUfAmGmGmUmGmUmUmCmA*mA*mA |
| | SEQ ID NO: 1301 | PmU*fU*mUmGfAmAfCmAmCmCmUmAmGfCmAfUmCmUmGmCmA*mA*mA |
| Duplex NO: 458 | SEQ ID NO: 1302 | mG*mC*mAmGmAmUmGmCfUfAfGmGmUmGmUmUmCmAmA*mG*mA |
| | SEQ ID NO: 1303 | PmU*fC*mUmUfGmAfAmCmAmCmCmUmAfGmCfAmUmCmUmGmC*mA*mA |
| Duplex NO: 459 | SEQ ID NO: 1304 | mC*mA*mGmAmUmGmCmUfAfGfGmUmGmUmUmCmAmAmG*mG*mA |
| | SEQ ID NO: 1305 | PmU*fC*mCmUfUmGfAmAmCmAmCmCmUfAmGfCmAmUmCmUmG*mC*mA |
| Duplex NO: 460 | SEQ ID NO: 1306 | mA*mG*mAmUmGmCmUmAfGfGfUmGmUmUmCmAmAmGmG*mA*mA |
| | SEQ ID NO: 1307 | PmU*fU*mCmCfUmUfGmAmAmCmAmCmCfUmAfGmCmAmUmCmU*mG*mC |
| Duplex NO: 461 | SEQ ID NO: 1308 | mG*mC*mUmAmGmGmUmGfUfUfCmAmAmGmGmAmGmCmA*mU*mA |
| | SEQ ID NO: 1309 | PmU*fA*mUmGfCmUfCmCmUmUmGmAmAfCmAfCmCmUmAmGmC*mA*mU |
| Duplex NO: 462 | SEQ ID NO: 1310 | mU*mA*mGmGmUmGmUmUfCfAfAmGmGmAmGmCmAmUmG*mC*mA |
| | SEQ ID NO: 1311 | PmU*fG*mCmAfUmGfCmUmCmCmUmUmGfAmAfCmAmCmCmUmA*mG*mC |
| Duplex NO: 463 | SEQ ID NO: 1312 | mA*mG*mGmUmGmUmUmCfAfAfGmGmAmGmCmAmUmGmC*mA*mA |
| | SEQ ID NO: 1313 | PmU*fU*mGmCfAmUfGmCmUmCmCmUmUfGmAfAmCmAmCmCmU*mA*mG |
| Duplex NO: 464 | SEQ ID NO: 1314 | mG*mG*mUmGmUmUmCmAfAfGfGmAmGmCmAmUmGmCmA*mA*mA |
| | SEQ ID NO: 1315 | PmU*fU*mUmGfCmAfUmGmCmUmCmCmUfUmGfAmAmCmAmCmC*mU*mA |
| Duplex NO: 465 | SEQ ID NO: 1316 | mU*mG*mUmUmCmAmAmGfGfAfGmCmAmUmGmCmAmAmA*mG*mA |
| | SEQ ID NO: 1317 | PmU*fC*mUmUfUmGfCmAmUmGmCmUmCfCmUfUmGmAmAmCmA*mC*mC |
| Duplex NO: 466 | SEQ ID NO: 1318 | mG*mU*mUmCmAmAmGmGfAfGfCmAmUmGmCmAmAmAmG*mA*mA |
| | SEQ ID NO: 1319 | PmU*fU*mCmUfUmUfGmCmAmUmGmCmUfCmCfUmUmGmAmAmC*mA*mC |
| Duplex NO: 467 | SEQ ID NO: 1320 | mC*mC*mCmGmGmCmAmGfCfUfUmGmCmCmCmGmAmAmU*mU*mA |
| | SEQ ID NO: 1321 | PmU*fA*mAmUfUmCfGmGmGmCmAmAmGfCmUfGmCmCmGmGmG*mC*mA |
| Duplex NO: 468 | SEQ ID NO: 1322 | mC*mG*mGmCmAmGmCmUfUfGfCmCmCmGmAmAmUmUmG*mU*mA |
| | SEQ ID NO: 1323 | PmU*fA*mCmAfAmUfUmCmGmGmGmCmAfAmGfCmUmGmCmCmG*mG*mG |
| Duplex NO: 469 | SEQ ID NO: 1324 | mC*mA*mUmUmGmGmCmAfGfCfAmGmGmAmCmAmUmCmU*mU*mA |
| | SEQ ID NO: 1325 | PmU*fA*mAmGfAmUfGmUmCmCmUmGmCfUmGfCmCmAmAmUmG*mC*mU |
| Duplex NO: 470 | SEQ ID NO: 1326 | mA*mU*mUmGmGmCmAmGfCfAfGmGmAmCmAmUmCmUmU*mG*mA |
| | SEQ ID NO: 1327 | PmU*fC*mAmAfGmAfUmGmUmCmCmUmGfCmUfGmCmCmAmAmU*mG*mC |
| Duplex NO: 471 | SEQ ID NO: 1328 | mU*mG*mGmCmAmGmCmAfGfGfAmCmAmUmCmUmUmGmU*mC*mA |
| | SEQ ID NO: 1329 | PmU*fG*mAmCfAmAfGmAmUmGmUmCmCfUmGfCmUmGmCmCmA*mA*mU |
| Duplex NO: 472 | SEQ ID NO: 1330 | mU*mA*mUmUmUmGmUmUfCfAfGmAmGmAmGmGmCmCmU*mU*mA |
| | SEQ ID NO: 1331 | PmU*fA*mAmGfGmCfCmUmCmUmCmUmGfAmAfCmAmAmAmUmA*mG*mC |
| Duplex NO: 473 | SEQ ID NO: 1332 | mU*mU*mAmCmUmAmAmAfGfAfUmAmUmCmAmGmAmGmC*mU*mA |
| | SEQ ID NO: 1333 | PmU*fA*mGmCfUmCfUmGmAmUmAmUmCfUmUfUmAmGmUmAmA*mA*mG |
| Duplex NO: 474 | SEQ ID NO: 1334 | mC*mA*mAmAmUmCmUmGfUfAfUmAmUmGmUmUmGmUmA*mA*mA |
| | SEQ ID NO: 1335 | PmU*fU*mUmAfCmAfAmCmAmUmAmUmAfCmAfGmAmUmUmUmG*mA*mU |
| Duplex NO: 475 | SEQ ID NO: 1336 | mA*mA*mAmUmCmUmGmUfAfUfAmUmGmUmUmGmUmAmA*mU*mA |
| | SEQ ID NO: 1337 | PmU*fA*mUmUfAmCfAmAmCmAmUmAmUfAmCfAmGmAmUmUmU*mG*mA |
| Duplex NO: 476 | SEQ ID NO: 1338 | mG*mU*mAmCmUmGmAmUfAfAfAmAmUmAmCmUmCmUmA*mG*mA |
| | SEQ ID NO: 1339 | PmU*fC*mUmAfGmAfGmUmAmUmUmUmUfAmUfCmAmGmUmAmC*mA*mC |
| Duplex NO: 477 | SEQ ID NO: 1340 | mU*mU*mGmUmCmCmAmGfGfAfAmAmCmCmCmUmGmGmC*mU*mA |
| | SEQ ID NO: 1341 | PmU*fA*mGmCfCmAfGmGmGmUmUmUmCfCmUfGmGmAmCmAmA*mC*mA |
| Duplex NO: 478 | SEQ ID NO: 1342 | mU*mC*mCmAmGmGmAmAfAfCfCmCmUmGmGmCmUmUmG*mC*mA |
| | SEQ ID NO: 1343 | PmU*fG*mCmAfAmGfCmCmAmGmGmGmUfUmUfCmCmUmGmGmA*mC*mA |
| Duplex NO: 479 | SEQ ID NO: 1344 | mU*mU*mGmUmAmGmAmAfGfAfUmGmGmAmCmUmCmUmG*mA*mA |
| | SEQ ID NO: 1345 | PmU*fU*mCmAfGmAfGmUmCmCmAmUmCfUmUfCmUmAmCmAmA*mG*mA |
| Duplex NO: 480 | SEQ ID NO: 1346 | mU*mG*mUmAmGmAmAmGfAfUfGmGmAmCmUmCmUmGmA*mA*mA |
| | SEQ ID NO: 1347 | PmU*fU*mUmCfAmGfAmGmUmCmCmAmUfCmUfUmCmUmAmCmA*mA*mG |
| Duplex NO: 481 | SEQ ID NO: 1348 | mU*mA*mAmUmGmUmUmUfUfGfUmAmCmAmAmUmUmAmC*mU*mA |
| | SEQ ID NO: 1349 | PmU*fA*mGmUfAmAfUmUmGmUmAmCmAfAmAfAmCmAmUmUmA*mA*mU |
| Duplex NO: 482 | SEQ ID NO: 1350 | mU*mA*mUmAmCmAmUmUfUfUfGmUmUmAmUmAmGmAmA*mU*mA |
| | SEQ ID NO: 1351 | PmU*fA*mUmUfCmUfAmUmAmAmCmAmAfAmAfUmGmUmAmUmA*mC*mA |
| Duplex NO: 483 | SEQ ID NO: 1352 | mU*mA*mCmAmUmUmUmUfGfUfUmAmUmAmGmAmAmUmA*mC*mA |
| | SEQ ID NO: 1353 | PmU*fG*mUmAfUmUfCmUmAmUmAmAmCfAmAfAmAmUmGmUmA*mU*mA |
| Duplex NO: 484 | SEQ ID NO: 1354 | mA*mC*mAmUmUmUmUmGfUfUfAmUmAmGmAmAmUmAmC*mU*mA |
| | SEQ ID NO: 1355 | PmU*fA*mGmUfAmUfUmCmUmAmUmAmAfCmAfAmAmAmUmGmU*mA*mU |
| Duplex NO: 485 | SEQ ID NO: 1356 | mC*mA*mAmUmGmUmUmGfUfCfAmAmGmAmCmUmUmUmU*mU*mA |
| | SEQ ID NO: 1357 | PmU*fA*mAmAfAmAfGmUmCmUmUmGmAfCmAfAmCmAmUmUmG*mU*mA |
| Duplex NO: 486 | SEQ ID NO: 1358 | mA*mA*mUmGmUmUmGmUfCfAfAmGmAmCmUmUmUmUmU*mC*mA |
| | SEQ ID NO: 1359 | PmU*fG*mAmAfAmAfAmGmUmCmUmUmGfAmCfAmAmCmAmUmU*mG*mU |
| Duplex NO: 487 | SEQ ID NO: 1360 | mA*mU*mGmUmUmGmUmCfAfAfGmAmCmUmUmUmUmUmC*mG*mA |
| | SEQ ID NO: 1361 | PmU*fC*mGmAfAmAfAmAmGmUmCmUmUfGmAfCmAmAmCmAmU*mU*mG |
| Duplex NO: 488 | SEQ ID NO: 1362 | mU*mC*mUmGmCmAmUmGfAfUfGmUmCmCmAmUmGmAmA*mC*mA |
| | SEQ ID NO: 1363 | PmU*fG*mUmUfCmAfUmGmGmAmCmAmUfCmAfUmGmCmAmGmA*mU*mG |
| Duplex NO: 489 | SEQ ID NO: 1364 | mC*mU*mGmCmAmUmGmAfUfGfUmCmCmAmUmGmAmAmC*mA*mA |
| | SEQ ID NO: 1365 | PmU*fU*mGmUfUmCfAmUmGmGmAmCmAfUmCfAmUmGmCmAmG*mA*mU |
| Duplex NO: 490 | SEQ ID NO: 1366 | mU*mA*mAmGmAmUmCmUfGfUfGmGmUmUmGmGmAmAmU*mU*mA |
| | SEQ ID NO: 1367 | PmU*fA*mAmUfUmCfCmAmAmCmCmAmCfAmGfAmUmCmUmUmA*mU*mU |
| Duplex NO: 491 | SEQ ID NO: 1368 | mA*mA*mGmAmUmCmUmGfUfGfGmUmUmGmGmAmAmUmU*mA*mA |
| | SEQ ID NO: 1369 | PmU*fU*mAmAfUmUfCmCmAmAmCmCmAfCmAfGmAmUmCmUmU*mA*mU |
| Duplex NO: 492 | SEQ ID NO: 1370 | mA*mG*mAmUmCmUmGmUfGfGfUmUmGmGmAmAmUmUmA*mU*mA |
| | SEQ ID NO: 1371 | PmU*fA*mUmAfAmUfUmCmCmAmAmCmCfAmCfAmGmAmUmCmU*mU*mA |
| Duplex NO: 493 | SEQ ID NO: 1372 | mU*mG*mUmAmUmAmUmUfUfAfCmUmUmCmCmAmGmUmU*mC*mA |
| | SEQ ID NO: 1373 | PmU*fG*mAmAfCmUfGmGmAmAmGmUmAfAmAfUmAmUmAmCmA*mG*mG |
| Duplex NO: 494 | SEQ ID NO: 1374 | mG*mU*mAmUmAmUmUmUfAfCfUmUmCmCmAmGmUmUmC*mC*mA |
| | SEQ ID NO: 1375 | PmU*fG*mGmAfAmCfUmGmGmAmAmGmUfAmAfAmUmAmUmAmC*mA*mG |
| Duplex NO: 495 | SEQ ID NO: 1376 | mU*mA*mUmAmUmUmUmAfCfUfUmCmCmAmGmUmUmCmC*mA*mA |
| | SEQ ID NO: 1377 | PmU*fU*mGmGfAmAfCmUmGmGmAmAmGfUmAfAmAmUmAmUmA*mC*mA |
| Duplex NO: 496 | SEQ ID NO: 1378 | mU*mU*mUmAmCmUmUmCfCfAfGmUmUmCmCmAmGmAmA*mU*mA |
| | SEQ ID NO: 1379 | PmU*fA*mUmUfCmUfGmGmAmAmCmUmGfGmAfAmGmUmAmAmA*mU*mA |
| Duplex NO: 497 | SEQ ID NO: 1380 | mU*mA*mUmUmUmUmGmGfGfUfAmUmUmGmCmUmGmGmC*mC*mA |
| | SEQ ID NO: 1381 | PmU*fG*mGmCfCmAfGmCmAmAmUmAmCfCmCfAmAmAmAmUmA*mU*mA |
| Duplex NO: 498 | SEQ ID NO: 1382 | mU*mA*mUmUmCmAmGmUfAfCfAmGmUmUmGmUmCmAmU*mU*mA |
| | SEQ ID NO: 1383 | PmU*fA*mAmUfGmAfCmAmAmCmUmGmUfAmCfUmGmAmAmUmA*mC*mA |
| Duplex NO: 499 | SEQ ID NO: 1384 | mA*mU*mUmCmAmGmUmAfCfAfGmUmUmGmUmCmAmUmU*mC*mA |
| | SEQ ID NO: 1385 | PmU*fG*mAmAfUmGfAmCmAmAmCmUmGfUmAfCmUmGmAmAmU*mA*mC |
| Duplex NO: 500 | SEQ ID NO: 1386 | mA*mG*mAmCmAmAmAmGfAfAfUmUmGmAmCmAmGmGmC*mU*mA |
| | SEQ ID NO: 1387 | PmU*fA*mGmCfCmUfGmUmCmAmAmUmUfCmUfUmUmGmUmCmU*mA*mA |
| Duplex NO: 501 | SEQ ID NO: 1388 | mG*mA*mCmAmAmAmGmAfAfUfUmGmAmCmAmGmGmCmU*mU*mA |
| | SEQ ID NO: 1389 | PmU*fA*mAmGfCmCfUmGmUmCmAmAmUfUmCfUmUmUmGmUmC*mU*mA |
| Duplex NO: 502 | SEQ ID NO: 1390 | mG*mC*mUmUmGmAmAmUfGfAfAmGmCmUmUmUmGmCmC*mC*mA |
| | SEQ ID NO: 1391 | PmU*fG*mGmGfCmAfAmAmGmCmUmUmCfAmUfUmCmAmAmGmC*mC*mU |
| Duplex NO: 503 | SEQ ID NO: 1392 | mC*mU*mUmGmAmAmUmGfAfAfGmCmUmUmUmGmCmCmC*mU*mA |
| | SEQ ID NO: 1393 | PmU*fA*mGmGfGmCfAmAmAmGmCmUmUfCmAfUmUmCmAmAmG*mC*mC |
| Duplex NO: 504 | SEQ ID NO: 1394 | mU*mU*mGmAmAmUmGmAfAfGfCmUmUmUmGmCmCmCmU*mU*mA |
| | SEQ ID NO: 1395 | PmU*fA*mAmGfGmGfCmAmAmAmGmCmUfUmCfAmUmUmCmAmA*mG*mC |
| Duplex NO: 505 | SEQ ID NO: 1396 | mA*mU*mGmAmAmGmCmUfUfUfGmCmCmCmUmUmUmUmU*mC*mA |
| | SEQ ID NO: 1397 | PmU*fG*mAmAfAmAfAmGmGmGmCmAmAfAmGfCmUmUmCmAmU*mU*mC |
| Duplex NO: 506 | SEQ ID NO: 1398 | mC*mA*mAmAmGmUmUmUfGfCfCmCmUmCmAmGmUmUmC*mC*mA |
| | SEQ ID NO: 1399 | PmU*fG*mGmAfAmCfUmGmAmGmGmGmCfAmAfAmCmUmUmUmG*mC*mU |
| Duplex NO: 507 | SEQ ID NO: 1400 | mA*mA*mGmUmUmUmGmCfCfCfUmCmAmGmUmUmCmCmA*mA*mA |
| | SEQ ID NO: 1401 | PmU*fU*mUmGfGmAfAmCmUmGmAmGmGfGmCfAmAmAmCmUmU*mU*mG |
| Duplex NO: 508 | SEQ ID NO: 1402 | mC*mA*mAmCmUmCmAmCfAfGfGmAmUmGmAmAmGmUmA*mA*mA |
| | SEQ ID NO: 1403 | PmU*fU*mUmAfCmUfUmCmAmUmCmCmUfGmUfGmAmGmUmUmG*mG*mA |
| Duplex NO: 509 | SEQ ID NO: 1404 | mA*mA*mCmUmCmAmCmAfGfGfAmUmGmAmAmGmUmAmA*mG*mA |
| | SEQ ID NO: 1405 | PmU*fC*mUmUfAmCfUmUmCmAmUmCmCfUmGfUmGmAmGmUmU*mG*mG |
| Duplex NO: 510 | SEQ ID NO: 1406 | mG*mA*mAmGmUmAmAmGfGfGfAmAmAmAmUmAmUmUmG*mC*mA |
| | SEQ ID NO: 1407 | PmU*fG*mCmAfAmUfAmUmUmUmUmCmCfCmUfUmAmCmUmUmC*mA*mU |
| Duplex NO: 511 | SEQ ID NO: 1408 | mA*mA*mGmUmAmAmGmGfGfAfAmAmAmUmAmUmUmGmC*mU*mA |
| | SEQ ID NO: 1409 | PmU*fA*mGmCfAmAfUmAmUmUmUmUmCfCmCfUmUmAmCmUmU*mC*mA |
| Duplex NO: 512 | SEQ ID NO: 1410 | mG*mU*mAmAmGmGmGmAfAfAfAmUmAmUmUmGmCmUmC*mG*mA |
| | SEQ ID NO: 1411 | PmU*fC*mGmAfGmCfAmAmUmAmUmUmUfUmCfCmCmUmUmAmC*mU*mU |
| Duplex NO: 513 | SEQ ID NO: 1412 | mA*mA*mGmGmGmAmAmAfAfUfAmUmUmGmCmUmCmGmU*mG*mA |
| | SEQ ID NO: 1413 | PmU*fC*mAmCfGmAfGmCmAmAmUmAmUfUmUfUmCmCmCmUmU*mA*mC |
| Duplex NO: 514 | SEQ ID NO: 1414 | mA*mG*mGmGmAmAmAmAfUfAfUmUmGmCmUmCmGmUmG*mG*mA |
| | SEQ ID NO: 1415 | PmU*fC*mCmAfCmGfAmGmCmAmAmUmAfUmUfUmUmCmCmCmU*mU*mA |
| Duplex NO: 515 | SEQ ID NO: 1416 | mG*mG*mGmAmAmAmAmUfAfUfUmGmCmUmCmGmUmGmG*mA*mA |
| | SEQ ID NO: 1417 | PmU*fU*mCmCfAmCfGmAmGmCmAmAmUfAmUfUmUmUmCmCmC*mU*mU |
| Duplex NO: 516 | SEQ ID NO: 1418 | mG*mG*mAmAmAmAmUmAfUfUfGmCmUmCmGmUmGmGmA*mA*mA |
| | SEQ ID NO: 1419 | PmU*fU*mUmCfCmAfCmGmAmGmCmAmAfUmAfUmUmUmUmCmC*mC*mU |
| Duplex NO: 517 | SEQ ID NO: 1420 | mA*mA*mAmUmAmUmUmGfCfUfCmGmUmGmGmAmAmUmG*mG*mA |
| | SEQ ID NO: 1421 | PmU*fC*mCmAfUmUfCmCmAmCmGmAmGfCmAfAmUmAmUmUmU*mU*mC |
| Duplex NO: 518 | SEQ ID NO: 1422 | mA*mA*mUmAmUmUmGmCfUfCfGmUmGmGmAmAmUmGmG*mC*mA |
| | SEQ ID NO: 1423 | PmU*fG*mCmCfAmUfUmCmCmAmCmGmAfGmCfAmAmUmAmUmU*mU*mU |
| Duplex NO: 519 | SEQ ID NO: 1424 | mA*mU*mAmUmUmGmCmUfCfGfUmGmGmAmAmUmGmGmC*mA*mA |
| | SEQ ID NO: 1425 | PmU*fU*mGmCfCmAfUmUmCmCmAmCmGfAmGfCmAmAmUmAmU*mU*mU |
| Duplex NO: 520 | SEQ ID NO: 1426 | mU*mA*mUmUmGmCmUmCfGfUfGmGmAmAmUmGmGmCmA*mA*mA |
| | SEQ ID NO: 1427 | PmU*fU*mUmGfCmCfAmUmUmCmCmAmCfGmAfGmCmAmAmUmA*mU*mU |
| Duplex NO: 521 | SEQ ID NO: 1428 | mA*mU*mUmGmCmUmCmGfUfGfGmAmAmUmGmGmCmAmA*mU*mA |
| | SEQ ID NO: 1429 | PmU*fA*mUmUfGmCfCmAmUmUmCmCmAfCmGfAmGmCmAmAmU*mA*mU |
| Duplex NO: 522 | SEQ ID NO: 1430 | mU*mU*mGmCmUmCmGmUfGfGfAmAmUmGmGmCmAmAmU*mU*mA |
| | SEQ ID NO: 1431 | PmU*fA*mAmUfUmGfCmCmAmUmUmCmCfAmCfGmAmGmCmAmA*mU*mA |
| Duplex NO: 523 | SEQ ID NO: 1432 | mU*mU*mGmAmAmUmGmUfCfUfUmGmUmGmAmUmUmGmG*mA*mA |
| | SEQ ID NO: 1433 | PmU*fU*mCmCfAmAfUmCmAmCmAmAmGfAmCfAmUmUmCmAmA*mC*mA |
| Duplex NO: 524 | SEQ ID NO: 1434 | mU*mG*mAmAmUmGmUmCfUfUfGmUmGmAmUmUmGmGmA*mG*mA |
| | SEQ ID NO: 1435 | PmU*fC*mUmCfCmAfAmUmCmAmCmAmAfGmAfCmAmUmUmCmA*mA*mC |
| Duplex NO: 525 | SEQ ID NO: 1436 | mU*mC*mUmUmGmUmGmAfUfUfGmGmAmGmUmUmGmGmU*mA*mA |
| | SEQ ID NO: 1437 | PmU*fU*mAmCfCmAfAmCmUmCmCmAmAfUmCfAmCmAmAmGmA*mC*mA |
| Duplex NO: 526 | SEQ ID NO: 1438 | mC*mU*mUmGmUmGmAmUfUfGfGmAmGmUmUmGmGmUmA*mC*mA |
| | SEQ ID NO: 1439 | PmU*fG*mUmAfCmCfAmAmCmUmCmCmAfAmUfCmAmCmAmAmG*mA*mC |
| Duplex NO: 527 | SEQ ID NO: 1440 | mU*mU*mGmUmGmAmUmUfGfGfAmGmUmUmGmGmUmAmC*mC*mA |
| | SEQ ID NO: 1441 | PmU*fG*mGmUfAmCfCmAmAmCmUmCmCfAmAfUmCmAmCmAmA*mG*mA |
| Duplex NO: 528 | SEQ ID NO: 1442 | mG*mU*mGmAmUmUmGmGfAfGfUmUmGmGmUmAmCmCmA*mU*mA |
| | SEQ ID NO: 1443 | PmU*fA*mUmGfGmUfAmCmCmAmAmCmUfCmCfAmAmUmCmAmC*mA*mA |
| Duplex NO: 529 | SEQ ID NO: 1444 | mG*mA*mUmUmGmGmAmGfUfUfGmGmUmAmCmCmAmUmG*mU*mA |
| | SEQ ID NO: 1445 | PmU*fA*mCmAfUmGfGmUmAmCmCmAmAfCmUfCmCmAmAmUmC*mA*mC |
| Duplex NO: 530 | SEQ ID NO: 1446 | mA*mU*mUmGmGmAmGmUfUfGfGmUmAmCmCmAmUmGmU*mC*mA |
| | SEQ ID NO: 1447 | PmU*fG*mAmCfAmUfGmGmUmAmCmCmAfAmCfUmCmCmAmAmU*mC*mA |
| Duplex NO: 531 | SEQ ID NO: 1448 | mU*mG*mGmAmGmUmUmGfGfUfAmCmCmAmUmGmUmCmA*mG*mA |
| | SEQ ID NO: 1449 | PmU*fC*mUmGfAmCfAmUmGmGmUmAmCfCmAfAmCmUmCmCmA*mA*mU |
| Duplex NO: 532 | SEQ ID NO: 1450 | mG*mG*mAmGmUmUmGmGfUfAfCmCmAmUmGmUmCmAmG*mG*mA |
| | SEQ ID NO: 1451 | PmU*fC*mCmUfGmAfCmAmUmGmGmUmAfCmCfAmAmCmUmCmC*mA*mA |
| Duplex NO: 533 | SEQ ID NO: 1452 | mU*mA*mUmGmUmGmCmUfGfCfUmUmUmGmGmCmUmGmC*mA*mA |
| | SEQ ID NO: 1453 | PmU*fU*mGmCfAmGfCmCmAmAmAmGmCfAmGfCmAmCmAmUmA*mA*mU |
| Duplex NO: 534 | SEQ ID NO: 1454 | mU*mU*mGmCmCmAmAmCfUfAfCmUmUmCmGmUmGmUmU*mC*mA |
| | SEQ ID NO: 1455 | PmU*fG*mAmAfCmAfCmGmAmAmGmUmAfGmUfUmGmGmCmAmA*mG*mA |
| Duplex NO: 535 | SEQ ID NO: 1456 | mU*mG*mCmCmAmAmCmUfAfCfUmUmCmGmUmGmUmUmC*mA*mA |
| | SEQ ID NO: 1457 | PmU*fU*mGmAfAmCfAmCmGmAmAmGmUfAmGfUmUmGmGmCmA*mA*mG |
| Duplex NO: 536 | SEQ ID NO: 1458 | mG*mC*mCmAmAmCmUmAfCfUfUmCmGmUmGmUmUmCmA*mU*mA |
| | SEQ ID NO: 1459 | PmU*fA*mUmGfAmAfCmAmCmGmAmAmGfUmAfGmUmUmGmGmC*mA*mA |
| Duplex NO: 537 | SEQ ID NO: 1460 | mC*mC*mAmAmCmUmAmCfUfUfCmGmUmGmUmUmCmAmU*mG*mA |
| | SEQ ID NO: 1461 | PmU*fC*mAmUfGmAfAmCmAmCmGmAmAfGmUfAmGmUmUmGmG*mC*mA |
| Duplex NO: 538 | SEQ ID NO: 1462 | mA*mA*mCmUmAmCmUmUfCfGfUmGmUmUmCmAmUmGmA*mC*mA |
| | SEQ ID NO: 1463 | PmU*fG*mUmCfAmUfGmAmAmCmAmCmGfAmAfGmUmAmGmUmU*mG*mG |
| Duplex NO: 539 | SEQ ID NO: 1464 | mA*mU*mUmAmGmAmGmCfUfUfUmCmUmCmGmGmGmAmA*mA*mA |
| | SEQ ID NO: 1465 | PmU*fU*mUmUfCmCfCmGmAmGmAmAmAfGmCfUmCmUmAmAmU*mA*mC |
| Duplex NO: 540 | SEQ ID NO: 1466 | mU*mU*mAmGmAmGmCmUfUfUfCmUmCmGmGmGmAmAmA*mG*mA |
| | SEQ ID NO: 1467 | PmU*fC*mUmUfUmCfCmCmGmAmGmAmAfAmGfCmUmCmUmAmA*mU*mA |
| Duplex NO: 541 | SEQ ID NO: 1468 | mU*mA*mGmAmGmCmUmUfUfCfUmCmGmGmGmAmAmAmG*mC*mA |
| | SEQ ID NO: 1469 | PmU*fG*mCmUfUmUfCmCmCmGmAmGmAfAmAfGmCmUmCmUmA*mA*mU |
| Duplex NO: 542 | SEQ ID NO: 1470 | mG*mA*mGmCmUmUmUmCfUfCfGmGmGmAmAmAmGmCmC*mG*mA |
| | SEQ ID NO: 1471 | PmU*fC*mGmGfCmUfUmUmCmCmCmGmAfGmAfAmAmGmCmUmC*mU*mA |
| Duplex NO: 543 | SEQ ID NO: 1472 | mG*mG*mGmAmAmAmGmCfCfGfCmGmAmGmGmGmUmCmG*mU*mA |
| | SEQ ID NO: 1473 | PmU*fA*mCmGfAmCfCmCmUmCmGmCmGfGmCfUmUmUmCmCmC*mG*mA |
| Duplex NO: 544 | SEQ ID NO: 1474 | mG*mG*mAmAmAmGmCmCfGfCfGmAmGmGmGmUmCmGmU*mC*mA |
| | SEQ ID NO: 1475 | PmU*fG*mAmCfGmAfCmCmCmUmCmGmCfGmGfCmUmUmUmCmC*mC*mG |
| Duplex NO: 545 | SEQ ID NO: 1476 | mG*mA*mAmAmGmCmCmGfCfGfAmGmGmGmUmCmGmUmC*mC*mA |
| | SEQ ID NO: 1477 | PmU*fG*mGmAfCmGfAmCmCmCmUmCmGfCmGfGmCmUmUmUmC*mC*mC |
| Duplex NO: 546 | SEQ ID NO: 1478 | mA*mA*mAmGmCmCmGmCfGfAfGmGmGmUmCmGmUmCmC*mA*mA |
| | SEQ ID NO: 1479 | PmU*fU*mGmGfAmCfGmAmCmCmCmUmCfGmCfGmGmCmUmUmU*mC*mC |
| Duplex NO: 547 | SEQ ID NO: 1480 | mA*mA*mGmCmCmGmCmGfAfGfGmGmUmCmGmUmCmCmA*mA*mA |
| | SEQ ID NO: 1481 | PmU*fU*mUmGfGmAfCmGmAmCmCmCmUfCmGfCmGmGmCmUmU*mU*mC |
| Duplex NO: 548 | SEQ ID NO: 1482 | mA*mG*mCmCmGmCmGmAfGfGfGmUmCmGmUmCmCmAmA*mU*mA |
| | SEQ ID NO: 1483 | PmU*fA*mUmUfGmGfAmCmGmAmCmCmCfUmCfGmCmGmGmCmU*mU*mU |
| Duplex NO: 549 | SEQ ID NO: 1484 | mG*mC*mCmGmCmGmAmGfGfGfUmCmGmUmCmCmAmAmU*mU*mA |
| | SEQ ID NO: 1485 | PmU*fA*mAmUfUmGfGmAmCmGmAmCmCfCmUfCmGmCmGmGmC*mU*mU |
| Duplex NO: 550 | SEQ ID NO: 1486 | mC*mC*mGmCmGmAmGmGfGfUfCmGmUmCmCmAmAmUmU*mU*mA |
| | SEQ ID NO: 1487 | PmU*fA*mAmAfUmUfGmGmAmCmGmAmCfCmCfUmCmGmCmGmG*mC*mU |
| Duplex NO: 551 | SEQ ID NO: 1488 | mC*mG*mCmGmAmGmGmGfUfCfGmUmCmCmAmAmUmUmU*mG*mA |
| | SEQ ID NO: 1489 | PmU*fC*mAmAfAmUfUmGmGmAmCmGmAfCmCfCmUmCmGmCmG*mG*mC |
| Duplex NO: 552 | SEQ ID NO: 1490 | mC*mC*mCmGmAmGmUmUfUfUfAmGmAmAmGmAmAmGmA*mA*mA |
| | SEQ ID NO: 1491 | PmU*fU*mUmCfUmUfCmUmUmCmUmAmAfAmAfCmUmCmGmGmG*mC*mA |
| Duplex NO: 553 | SEQ ID NO: 1492 | mC*mU*mCmAmGmAmGmGfGfUfCmAmAmGmAmUmGmAmU*mU*mA |
| | SEQ ID NO: 1493 | PmU*fA*mAmUfCmAfUmCmUmUmGmAmCfCmCfUmCmUmGmAmG*mU*mU |
| Duplex NO: 554 | SEQ ID NO: 1494 | mG*mG*mUmCmAmAmGmAfUfGfAmUmUmAmUmGmUmCmU*mC*mA |
| | SEQ ID NO: 1495 | PmU*fG*mAmGfAmCfAmUmAmAmUmCmAfUmCfUmUmGmAmCmC*mC*mU |
| Duplex NO: 555 | SEQ ID NO: 1496 | mG*mU*mCmAmAmGmAmUfGfAfUmUmAmUmGmUmCmUmC*mU*mA |
| | SEQ ID NO: 1497 | PmU*fA*mGmAfGmAfCmAmUmAmAmUmCfAmUfCmUmUmGmAmC*mC*mC |
| Duplex NO: 556 | SEQ ID NO: 1498 | mC*mA*mAmGmAmUmGmAfUfUfAmUmGmUmCmUmCmUmA*mG*mA |
| | SEQ ID NO: 1499 | PmU*fC*mUmAfGmAfGmAmCmAmUmAmAfUmCfAmUmCmUmUmG*mA*mC |
| Duplex NO: 557 | SEQ ID NO: 1500 | mA*mA*mGmAmUmGmAmUfUfAfUmGmUmCmUmCmUmAmG*mG*mA |
| | SEQ ID NO: 1501 | PmU*fC*mCmUfAmGfAmGmAmCmAmUmAfAmUfCmAmUmCmUmU*mG*mA |
| Duplex NO: 558 | SEQ ID NO: 1502 | mA*mG*mAmUmGmAmUmUfAfUfGmUmCmUmCmUmAmGmG*mC*mA |
| | SEQ ID NO: 1503 | PmU*fG*mCmCfUmAfGmAmGmAmCmAmUfAmAfUmCmAmUmCmU*mU*mG |
| Duplex NO: 559 | SEQ ID NO: 1504 | mG*mA*mUmGmAmUmUmAfUfGfUmCmUmCmUmAmGmGmC*mU*mA |
| | SEQ ID NO: 1505 | PmU*fA*mGmCfCmUfAmGmAmGmAmCmAfUmAfAmUmCmAmUmC*mU*mU |
| Duplex NO: 560 | SEQ ID NO: 1506 | mA*mU*mGmAmUmUmAmUfGfUfCmUmCmUmAmGmGmCmU*mU*mA |
| | SEQ ID NO: 1507 | PmU*fA*mAmGfCmCfUmAmGmAmGmAmCfAmUfAmAmUmCmAmU*mC*mU |
| Duplex NO: 561 | SEQ ID NO: 1508 | mU*mG*mAmUmUmAmUmGfUfCfUmCmUmAmGmGmCmUmU*mG*mA |
| | SEQ ID NO: 1509 | PmU*fC*mAmAfGmCfCmUmAmGmAmGmAfCmAfUmAmAmUmCmA*mU*mC |
| Duplex NO: 562 | SEQ ID NO: 1510 | mA*mU*mGmCmUmCmAmCfAfGfUmCmGmCmUmGmGmAmU*mA*mA |
| | SEQ ID NO: 1511 | PmU*fU*mAmUfCmCfAmGmCmGmAmCmUfGmUfGmAmGmCmAmU*mG*mA |
| Duplex NO: 563 | SEQ ID NO: 1512 | mU*mG*mCmUmCmAmCmAfGfUfCmGmCmUmGmGmAmUmA*mG*mA |
| | SEQ ID NO: 1513 | PmU*fC*mUmAfUmCfCmAmGmCmGmAmCfUmGfUmGmAmGmCmA*mU*mG |
| Duplex NO: 564 | SEQ ID NO: 1514 | mG*mC*mUmCmAmCmAmGfUfCfGmCmUmGmGmAmUmAmG*mC*mA |
| | SEQ ID NO: 1515 | PmU*fG*mCmUfAmUfCmCmAmGmCmGmAfCmUfGmUmGmAmGmC*mA*mU |
| Duplex NO: 565 | SEQ ID NO: 1516 | mC*mU*mCmAmCmAmGmUfCfGfCmUmGmGmAmUmAmGmC*mU*mA |
| | SEQ ID NO: 1517 | PmU*fA*mGmCfUmAfUmCmCmAmGmCmGfAmCfUmGmUmGmAmG*mC*mA |
| Duplex NO: 566 | SEQ ID NO: 1518 | mU*mC*mAmCmAmGmUmCfGfCfUmGmGmAmUmAmGmCmU*mG*mA |
| | SEQ ID NO: 1519 | PmU*fC*mAmGfCmUfAmUmCmCmAmGmCfGmAfCmUmGmUmGmA*mG*mC |
| Duplex NO: 567 | SEQ ID NO: 1520 | mC*mA*mCmAmGmUmCmGfCfUfGmGmAmUmAmGmCmUmG*mA*mA |
| | SEQ ID NO: 1521 | PmU*fU*mCmAfGmCfUmAmUmCmCmAmGfCmGfAmCmUmGmUmG*mA*mG |
| Duplex NO: 568 | SEQ ID NO: 1522 | mG*mA*mAmUmUmGmAmAfCfCfAmAmGmUmGmUmUmUmC*mC*mA |
| | SEQ ID NO: 1523 | PmU*fG*mGmAfAmAfCmAmCmUmUmGmGfUmUfCmAmAmUmUmC*mU*mC |
| Duplex NO: 569 | SEQ ID NO: 1524 | mG*mA*mAmCmCmAmAmGfUfGfUmUmUmCmCmCmUmCmU*mG*mA |
| | SEQ ID NO: 1525 | PmU*fC*mAmGfAmGfGmGmAmAmAmCmAfCmUfUmGmGmUmUmC*mA*mA |
| Duplex NO: 570 | SEQ ID NO: 1526 | mA*mA*mAmUmGmAmUmCfAfGfCmAmUmGmGmAmUmAmU*mU*mA |
| | SEQ ID NO: 1527 | PmU*fA*mAmUfAmUfCmCmAmUmGmCmUfGmAfUmCmAmUmUmU*mU*mA |
| Duplex NO: 571 | SEQ ID NO: 1528 | mA*mU*mGmAmUmCmAmGfCfAfUmGmGmAmUmAmUmUmG*mA*mA |
| | SEQ ID NO: 1529 | PmU*fU*mCmAfAmUfAmUmCmCmAmUmGfCmUfGmAmUmCmAmU*mU*mU |
| Duplex NO: 572 | SEQ ID NO: 1530 | mU*mC*mUmCmCmUmUmCfUfGfGmCmUmGmUmCmAmAmG*mU*mA |
| | SEQ ID NO: 1531 | PmU*fA*mCmUfUmGfAmCmAmGmCmCmAfGmAfAmGmGmAmGmA*mG*mC |
| Duplex NO: 573 | SEQ ID NO: 1532 | mC*mU*mCmCmUmUmCmUfGfGfCmUmGmUmCmAmAmGmU*mA*mA |
| | SEQ ID NO: 1533 | PmU*fU*mAmCfUmUfGmAmCmAmGmCmCfAmGfAmAmGmGmAmG*mA*mG |
| Duplex NO: 574 | SEQ ID NO: 1534 | mA*mA*mCmAmGmAmGmAfCfAfGmAmAmUmCmUmAmCmA*mC*mA |
| | SEQ ID NO: 1535 | PmU*fG*mUmGfUmAfGmAmUmUmCmUmGfUmCfUmCmUmGmUmU*mU*mG |
| Duplex NO: 575 | SEQ ID NO: 1536 | mA*mC*mAmGmAmGmAmCfAfGfAmAmUmCmUmAmCmAmC*mU*mA |
| | SEQ ID NO: 1537 | PmU*fA*mGmUfGmUfAmGmAmUmUmCmUfGmUfCmUmCmUmGmU*mU*mU |
| Duplex NO: 576 | SEQ ID NO: 1538 | mA*mU*mUmGmUmUmGmUfAfGfAmCmGmUmGmAmAmCmC*mU*mA |
| | SEQ ID NO: 1539 | PmU*fA*mGmGfUmUfCmAmCmGmUmCmUfAmCfAmAmCmAmAmU*mU*mG |
| Duplex NO: 577 | SEQ ID NO: 1540 | mA*mA*mGmUmUmGmAmGfGfUfUmAmUmAmAmAmAmCmC*mC*mA |
| | SEQ ID NO: 1541 | PmU*fG*mGmGfUmUfUmUmAmUmAmAmCfCmUfCmAmAmCmUmU*mU*mU |
| Duplex NO: 578 | SEQ ID NO: 1542 | mG*mU*mUmGmAmGmGmUfUfAfUmAmAmAmAmCmCmCmU*mU*mA |
| | SEQ ID NO: 1543 | PmU*fA*mAmGfGmGfUmUmUmUmAmUmAfAmCfCmUmCmAmAmC*mU*mU |
| Duplex NO: 579 | SEQ ID NO: 1544 | mU*mU*mGmAmGmGmUmUfAfUfAmAmAmAmCmCmCmUmU*mA*mA |
| | SEQ ID NO: 1545 | PmU*fU*mAmAfGmGfGmUmUmUmUmAmUfAmAfCmCmUmCmAmA*mC*mU |
| Duplex NO: 580 | SEQ ID NO: 1546 | mU*mG*mAmGmGmUmUmAfUfAfAmAmAmCmCmCmUmUmA*mG*mA |
| | SEQ ID NO: 1547 | PmU*fC*mUmAfAmGfGmGmUmUmUmUmAfUmAfAmCmCmUmCmA*mA*mC |
| Duplex NO: 581 | SEQ ID NO: 1548 | mG*mC*mAmGmAmGmAmAfAfGfGmUmGmCmAmAmAmAmU*mU*mA |
| | SEQ ID NO: 1549 | PmU*fA*mAmUfUmUfUmGmCmAmCmCmUfUmUfCmUmCmUmGmC*mA*mU |
| Duplex NO: 582 | SEQ ID NO: 1550 | mC*mA*mGmAmGmAmAmAfGfGfUmGmCmAmAmAmAmUmU*mC*mA |
| | SEQ ID NO: 1551 | PmU*fG*mAmAfUmUfUmUmGmCmAmCmCfUmUfUmCmUmCmUmG*mC*mA |
| Duplex NO: 583 | SEQ ID NO: 1552 | mA*mG*mAmGmAmAmAmGfGfUfGmCmAmAmAmAmUmUmC*mC*mA |
| | SEQ ID NO: 1553 | PmU*fG*mGmAfAmUfUmUmUmGmCmAmCfCmUfUmUmCmUmCmU*mG*mC |
| Duplex NO: 584 | SEQ ID NO: 1554 | mG*mA*mGmAmAmAmGmGfUfGfCmAmAmAmAmUmUmCmC*mU*mA |
| | SEQ ID NO: 1555 | PmU*fA*mGmGfAmAfUmUmUmUmGmCmAfCmCfUmUmUmCmUmC*mU*mG |
| Duplex NO: 585 | SEQ ID NO: 1556 | mA*mG*mAmAmAmGmGmUfGfCfAmAmAmAmUmUmCmCmU*mU*mA |
| | SEQ ID NO: 1557 | PmU*fA*mAmGfGmAfAmUmUmUmUmGmCfAmCfCmUmUmUmCmU*mC*mU |
| Duplex NO: 586 | SEQ ID NO: 1558 | mG*mA*mAmAmGmGmUmGfCfAfAmAmAmUmUmCmCmUmU*mA*mA |
| | SEQ ID NO: 1559 | PmU*fU*mAmAfGmGfAmAmUmUmUmUmGfCmAfCmCmUmUmUmC*mU*mC |
| Duplex NO: 587 | SEQ ID NO: 1560 | mA*mA*mAmGmGmUmGmCfAfAfAmAmUmUmCmCmUmUmA*mG*mA |
| | SEQ ID NO: 1561 | PmU*fC*mUmAfAmGfGmAmAmUmUmUmUfGmCfAmCmCmUmUmU*mC*mU |
| Duplex NO: 588 | SEQ ID NO: 1562 | mA*mA*mGmGmUmGmCmAfAfAfAmUmUmCmCmUmUmAmG*mU*mA |
| | SEQ ID NO: 1563 | PmU*fA*mCmUfAmAfGmGmAmAmUmUmUfUmGfCmAmCmCmUmU*mU*mC |
| Duplex NO: 589 | SEQ ID NO: 1564 | mA*mG*mGmUmGmCmAmAfAfAfUmUmCmCmUmUmAmGmU*mG*mA |
| | SEQ ID NO: 1565 | PmU*fC*mAmCfUmAfAmGmGmAmAmUmUfUmUfGmCmAmCmCmU*mU*mU |
| Duplex NO: 590 | SEQ ID NO: 1566 | mU*mG*mCmAmAmAmAmUfUfCfCmUmUmAmGmUmGmAmU*mG*mA |
| | SEQ ID NO: 1567 | PmU*fC*mAmUfCmAfCmUmAmAmGmGmAfAmUfUmUmUmGmCmA*mC*mC |
| Duplex NO: 591 | SEQ ID NO: 1568 | mG*mC*mAmAmAmAmUmUfCfCfUmUmAmGmUmGmAmUmG*mC*mA |
| | SEQ ID NO: 1569 | PmU*fG*mCmAfUmCfAmCmUmAmAmGmGfAmAfUmUmUmUmGmC*mA*mC |
| Duplex NO: 592 | SEQ ID NO: 1570 | mA*mA*mUmUmCmCmUmUfAfGfUmGmAmUmGmCmUmGmA*mG*mA |
| | SEQ ID NO: 1571 | PmU*fC*mUmCfAmGfCmAmUmCmAmCmUfAmAfGmGmAmAmUmU*mU*mU |
| Duplex NO: 593 | SEQ ID NO: 1572 | mU*mC*mCmUmUmAmGmUfGfAfUmGmCmUmGmAmGmAmU*mC*mA |
| | SEQ ID NO: 1573 | PmU*G*mAmUfCmUfCmAmGmCmAmUmCfAmCfUmAmAmGmGmA*mA*mU |
| Duplex NO: 594 | SEQ ID NO: 1574 | mC*mC*mUmUmAmGmUmGfAfUfGmCmUmGmAmGmAmUmC*mA*mA |
| | SEQ ID NO: 1575 | PmU*fU*mGmAfUmCfUmCmAmGmCmAmUfCmAfCmUmAmAmGmG*mA*mA |
| Duplex NO: 595 | SEQ ID NO: 1576 | mC*mU*mGmAmGmAmUmCfAfUfCmCmAmGmUmUmAmGmU*mC*mA |
| | SEQ ID NO: 1577 | PmU*fG*mAmCfUmAfAmCmUmGmGmAmUfGmAfUmCmUmCmAmG*mC*mA |
| Duplex NO: 596 | SEQ ID NO: 1578 | mU*mG*mAmGmAmUmCmAfUfCfCmAmGmUmUmAmGmUmC*mA*mA |
| | SEQ ID NO: 1579 | PmU*fU*mGmAfCmUfAmAmCmUmGmGmAfUmGfAmUmCmUmCmA*mG*mC |
| Duplex NO: 597 | SEQ ID NO: 1580 | mG*mA*mGmAmUmCmAmUfCfCfAmGmUmUmAmGmUmCmA*mA*mA |
| | SEQ ID NO: 1581 | PmU*fU*mUmGfAmCfUmAmAmCmUmGmGfAmUfGmAmUmCmUmC*mA*mG |
| Duplex NO: 598 | SEQ ID NO: 1582 | mA*mU*mCmAmUmCmCmAfGfUfUmAmGmUmCmAmAmUmG*mC*mA |
| | SEQ ID NO: 1583 | PmU*fG*mCmAfUmUfGmAmCmUmAmAmCfUmGfGmAmUmGmAmU*mC*mU |
| Duplex NO: 599 | SEQ ID NO: 1584 | mG*mU*mCmAmAmUmGmCfUfAfAmGmCmAmUmAmUmCmC*mC*mA |
| | SEQ ID NO: 1585 | PmU*fG*mGmGfAmUfAmUmGmCmUmUmAfGmCfAmUmUmGmAmC*mU*mA |
| Duplex NO: 600 | SEQ ID NO: 1586 | mC*mU*mAmAmGmCmAmUfAfUfCmCmCmAmGmCmCmUmA*mC*mA |
| | SEQ ID NO: 1587 | PmU*fG*mUmAfGmGfCmUmGmGmGmAmUfAmUfGmCmUmUmAmG*mC*mA |
| Duplex NO: 601 | SEQ ID NO: 1588 | mA*mA*mGmCmAmUmAmUfCfCfCmAmGmCmCmUmAmCmA*mA*mA |
| | SEQ ID NO: 1589 | PmU*fU*mUmGfUmAfGmGmCmUmGmGmGfAmUfAmUmGmCmUmU*mA*mG |
| Duplex NO: 602 | SEQ ID NO: 1590 | mU*mG*mGmAmAmAmCmUfCfUfGmAmUmGmGmAmAmAmC*mU*mA |
| | SEQ ID NO: 1591 | PmU*fA*mGmUfUmUfCmCmAmUmCmAmGfAmGfUmUmUmCmCmA*mA*mC |
| Duplex NO: 603 | SEQ ID NO: 1592 | mG*mG*mAmAmAmCmUmCfUfGfAmUmGmGmAmAmAmCmU*mC*mA |
| | SEQ ID NO: 1593 | PmU*fG*mAmGfUmUfUmCmCmAmUmCmAfGmAfGmUmUmUmCmC*mA*mA |
| Duplex NO: 604 | SEQ ID NO: 1594 | mG*mA*mAmAmCmUmCmUfGfAfUmGmGmAmAmAmCmUmC*mA*mA |
| | SEQ ID NO: 1595 | PmU*fU*mGmAfGmUfUmUmCmCmAmUmCfAmGfAmGmUmUmUmC*mC*mA |
| Duplex NO: 605 | SEQ ID NO: 1596 | mA*mA*mAmCmUmCmUmGfAfUfGmGmAmAmAmCmUmCmA*mU*mA |
| | SEQ ID NO: 1597 | PmU*fA*mUmGfAmGfUmUmUmCmCmAmUfCmAfGmAmGmUmUmU*mC*mC |
| Duplex NO: 606 | SEQ ID NO: 1598 | mG*mA*mUmGmGmAmAmAfCfUfCmAmUmGmAmGmCmGmU*mG*mA |
| | SEQ ID NO: 1599 | PmU*fC*mAmCfGmCfUmCmAmUmGmAmGfUmUfUmCmCmAmUmC*mA*mG |
| Duplex NO: 607 | SEQ ID NO: 1600 | mA*mU*mGmGmAmAmAmCfUfCfAmUmGmAmGmCmGmUmG*mG*mA |
| | SEQ ID NO: 1601 | PmU*fC*mCmAfCmGfCmUmCmAmUmGmAfGmUfUmUmCmCmAmU*mC*mA |
| Duplex NO: 608 | SEQ ID NO: 1602 | mU*mG*mGmAmAmAmCmUfCfAfUmGmAmGmCmGmUmGmG*mU*mA |
| | SEQ ID NO: 1603 | PmU*fA*mCmCfAmCfGmCmUmCmAmUmGfAmGfUmUmUmCmCmA*mU*mC |
| Duplex NO: 609 | SEQ ID NO: 1604 | mG*mG*mAmAmAmCmUmCfAfUfGmAmGmCmGmUmGmGmU*mG*mA |
| | SEQ ID NO: 1605 | PmU*fC*mAmCfCmAfCmGmCmUmCmAmUfGmAfGmUmUmUmCmC*mA*mU |
| Duplex NO: 610 | SEQ ID NO: 1606 | mG*mA*mAmAmCmUmCmAfUfGfAmGmCmGmUmGmGmUmG*mU*mA |
| | SEQ ID NO: 1607 | PmU*fA*mCmAfCmCfAmCmGmCmUmCmAfUmGfAmGmUmUmUmC*mC*mA |
| Duplex NO: 611 | SEQ ID NO: 1608 | mA*mG*mCmGmUmGmGmUfGfUfAmUmCmUmAmUmUmCmG*mC*mA |
| | SEQ ID NO: 1609 | PmU*fG*mCmGfAmAfUmAmGmAmUmAmCfAmCfCmAmCmGmCmU*mC*mA |
| Duplex NO: 612 | SEQ ID NO: 1610 | mU*mA*mCmCmUmUmAmCfAfGfGmGmAmUmUmAmUmAmA*mU*mA |
| | SEQ ID NO: 1611 | PmU*fA*mUmUfAmUfAmAmUmCmCmCmUfGmUfAmAmGmGmUmA*mG*mG |
| Duplex NO: 613 | SEQ ID NO: 1612 | mA*mC*mCmUmUmAmCmAfGfGfGmAmUmUmAmUmAmAmU*mU*mA |
| | SEQ ID NO: 1613 | PmU*fA*mAmUfUmAfUmAmAmUmCmCmCfUmGfUmAmAmGmGmU*mA*mG |
| Duplex NO: 614 | SEQ ID NO: 1614 | mG*mG*mGmAmUmUmAmUfAfAfUmUmAmCmUmCmCmUmU*mG*mA |
| | SEQ ID NO: 1615 | PmU*fC*mAmAfGmGfAmGmUmAmAmUmUfAmUfAmAmUmCmCmC*mU*mG |
| Duplex NO: 615 | SEQ ID NO: 1616 | mG*mG*mAmUmUmAmUmAfAfUfUmAmCmUmCmCmUmUmG*mG*mA |
| | SEQ ID NO: 1617 | PmU*fC*mCmAfAmGfGmAmGmUmAmAmUfUmAfUmAmAmUmCmC*mC*mU |
| Duplex NO: 616 | SEQ ID NO: 1618 | mG*mA*mUmUmAmUmAmAfUfUfAmCmUmCmCmUmUmGmG*mU*mA |
| | SEQ ID NO: 1619 | PmU*fA*mCmCfAmAfGmGmAmGmUmAmAfUmUfAmUmAmAmUmC*mC*mC |
| Duplex NO: 617 | SEQ ID NO: 1620 | mA*mU*mUmAmUmAmAmUfUfAfCmUmCmCmUmUmGmGmU*mG*mA |
| | SEQ ID NO: 1621 | PmU*fC*mAmCfCmAfAmGmGmAmGmUmAfAmUfUmAmUmAmAmU*mC*mC |
| Duplex NO: 618 | SEQ ID NO: 1622 | mA*mA*mUmUmAmCmUmCfCfUfUmGmGmUmGmAmUmGmG*mG*mA |
| | SEQ ID NO: 1623 | PmU*fC*mCmCfAmUfCmAmCmCmAmAmGfGmAfGmUmAmAmUmU*mA*mU |
| Duplex NO: 619 | SEQ ID NO: 1624 | mA*mU*mUmAmCmUmCmCfUfUfGmGmUmGmAmUmGmGmG*mA*mA |
| | SEQ ID NO: 1625 | PmU*fU*mCmCfCmAfUmCmAmCmCmAmAfGmGfAmGmUmAmAmU*mU*mA |
| Duplex NO: 620 | SEQ ID NO: 1626 | mC*mC*mUmUmGmGmUmGfAfUfGmGmGmAmGmCmUmUmG*mU*mA |
| | SEQ ID NO: 1627 | PmU*fA*mCmAfAmGfCmUmCmCmCmAmUfCmAfCmCmAmAmGmG*mA*mG |
| Duplex NO: 621 | SEQ ID NO: 1628 | mU*mG*mGmUmGmAmUmGfGfGfAmGmCmUmUmGmUmUmG*mU*mA |
| | SEQ ID NO: 1629 | PmU*fA*mCmAfAmCfAmAmGmCmUmCmCfCmAfUmCmAmCmCmA*mA*mG |
| Duplex NO: 622 | SEQ ID NO: 1630 | mU*mA*mUmUmGmGmAmUfAfUfAmUmGmCmCmCmAmUmC*mC*mA |
| | SEQ ID NO: 1631 | PmU*fG*mGmAfUmGfGmGmCmAmUmAmUfAmUfCmCmAmAmUmA*mA*mC |
| Duplex NO: 623 | SEQ ID NO: 1632 | mA*mU*mUmGmGmAmUmAfUfAfUmGmCmCmCmAmUmCmC*mC*mA |
| | SEQ ID NO: 1633 | PmU*fG*mGmGfAmUfGmGmGmCmAmUmAfUmAfUmCmCmAmAmU*mA*mA |
| Duplex NO: 624 | SEQ ID NO: 1634 | mC*mA*mGmAmAmGmGmUfUfGfUmCmUmUmGmUmGmGmC*mC*mA |
| | SEQ ID NO: 1635 | PmU*fG*mGmCfCmAfCmAmAmGmAmCmAfAmCfCmUmUmCmUmG*mU*mU |
| Duplex NO: 625 | SEQ ID NO: 1636 | mA*mG*mGmUmUmGmUmCfUfUfGmUmGmGmCmCmAmGmC*mA*mA |
| | SEQ ID NO: 1637 | PmU*fU*mGmCfUmGfGmCmCmAmCmAmAfGmAfCmAmAmCmCmU*mU*mC |
| Duplex NO: 626 | SEQ ID NO: 1638 | mU*mU*mGmUmCmUmUmGfUfGfGmCmCmAmGmCmAmCmC*mA*mA |
| | SEQ ID NO: 1639 | PmU*fU*mGmGfUmGfCmUmGmGmCmCmAfCmAfAmGmAmCmAmA*mC*mC |
| Duplex NO: 627 | SEQ ID NO: 1640 | mU*mG*mUmCmUmUmGmUfGfGfCmCmAmGmCmAmCmCmA*mA*mA |
| | SEQ ID NO: 1641 | PmU*fU*mUmGfGmUfGmCmUmGmGmCmCfAmCfAmAmGmAmCmA*mA*mC |
| Duplex NO: 628 | SEQ ID NO: 1642 | mA*mG*mGmUmCmUmUmGfGfUfGmGmAmGmGmUmGmCmC*mA*mA |
| | SEQ ID NO: 1643 | PmU*fU*mGmGfCmAfCmCmUmCmCmAmCfCmAfAmGmAmCmCmU*mA*mU |
| Duplex NO: 629 | SEQ ID NO: 1644 | mG*mG*mUmCmUmUmGmGfUfGfGmAmGmGmUmGmCmCmA*mG*mA |
| | SEQ ID NO: 1645 | PmU*fC*mUmGfGmCfAmCmCmUmCmCmAfCmCfAmAmGmAmCmC*mU*mA |
| Duplex NO: 630 | SEQ ID NO: 1646 | mG*mU*mGmGmAmGmGmUfGfCfCmAmGmCmAmGmCmCmG*mA*mA |
| | SEQ ID NO: 1647 | PmU*fU*mCmGfGmCfUmGmCmUmGmGmCfAmCfCmUmCmCmAmC*mC*mA |
| Duplex NO: 631 | SEQ ID NO: 1648 | mG*mU*mGmCmCmAmGmCfAfGfCmCmGmAmGmUmCmCmU*mU*mA |
| | SEQ ID NO: 1649 | PmU*fA*mAmGfGmAfCmUmCmGmGmCmUfGmCfUmGmGmCmAmC*mC*mU |
| Duplex NO: 632 | SEQ ID NO: 1650 | mC*mA*mGmCmAmGmCmCfGfAfGmUmCmCmUmUmGmCmA*mG*mA |
| | SEQ ID NO: 1651 | PmU*fC*mUmGfCmAfAmGmGmAmCmUmCfGmGfCmUmGmCmUmG*mG*mC |
| Duplex NO: 633 | SEQ ID NO: 1652 | mA*mG*mCmAmGmCmCmGfAfGfUmCmCmUmUmGmCmAmG*mA*mA |
| | SEQ ID NO: 1653 | PmU*fU*mCmUfGmCfAmAmGmGmAmCmUfCmGfGmCmUmGmCmU*mG*mG |
| Duplex NO: 634 | SEQ ID NO: 1654 | mG*mC*mAmGmCmCmGmAfGfUfCmCmUmUmGmCmAmGmA*mU*mA |
| | SEQ ID NO: 1655 | PmU*fA*mUmCfUmGfCmAmAmGmGmAmCfUmCfGmGmCmUmGmC*mU*mG |
| Duplex NO: 635 | SEQ ID NO: 1656 | mC*mA*mGmCmCmGmAmGfUfCfCmUmUmGmCmAmGmAmU*mG*mA |
| | SEQ ID NO: 1657 | PmU*fC*mAmUfCmUfGmCmAmAmGmGmAfCmUfCmGmGmCmUmG*mC*mU |
| Duplex NO: 636 | SEQ ID NO: 1658 | mG*mC*mCmGmAmGmUmCfCfUfUmGmCmAmGmAmUmGmG*mG*mA |
| | SEQ ID NO: 1659 | PmU*fC*mCmCfAmUfCmUmGmCmAmAmGfGmAfCmUmCmGmGmC*mU*mG |
| Duplex NO: 637 | SEQ ID NO: 1660 | mC*mG*mAmGmUmCmCmUfUfGfCmAmGmAmUmGmGmGmA*mU*mA |
| | SEQ ID NO: 1661 | PmU*fA*mUmCfCmCfAmUmCmUmGmCmAfAmGfGmAmCmUmCmG*mG*mC |
| Duplex NO: 638 | SEQ ID NO: 1662 | mU*mU*mGmCmAmGmAmUfGfGfGmAmUmGmAmCmUmCmG*mU*mA |
| | SEQ ID NO: 1663 | PmU*fA*mCmGfAmGfUmCmAmUmCmCmCfAmUfCmUmGmCmAmA*mG*mG |
| Duplex NO: 639 | SEQ ID NO: 1664 | mU*mG*mCmAmGmAmUmGfGfGfAmUmGmAmCmUmCmGmU*mG*mA |
| | SEQ ID NO: 1665 | PmU*fC*mAmCfGmAfGmUmCmAmUmCmCfCmAfUmCmUmGmCmA*mA*mG |
| Duplex NO: 640 | SEQ ID NO: 1666 | mG*mC*mAmGmAmUmGmGfGfAfUmGmAmCmUmCmGmUmG*mG*mA |
| | SEQ ID NO: 1667 | PmU*fC*mCmAfCmGfAmGmUmCmAmUmCfCmCfAmUmCmUmGmC*mA*mA |
| Duplex NO: 641 | SEQ ID NO: 1668 | mC*mA*mGmAmUmGmGmGfAfUfGmAmCmUmCmGmUmGmG*mC*mA |
| | SEQ ID NO: 1669 | PmU*fG*mCmCfAmCfGmAmGmUmCmAmUfCmCfCmAmUmCmUmG*mC*mA |
| Duplex NO: 642 | SEQ ID NO: 1670 | mA*mG*mAmUmGmGmGmAfUfGfAmCmUmCmGmUmGmGmC*mC*mA |
| | SEQ ID NO: 1671 | PmU*fG*mGmCfCmAfCmGmAmGmUmCmAfUmCfCmCmAmUmCmU*mG*mC |
| Duplex NO: 643 | SEQ ID NO: 1672 | mG*mA*mUmGmGmGmAmUfGfAfCmUmCmGmUmGmGmCmC*mC*mA |
| | SEQ ID NO: 1673 | PmU*fG*mGmGfCmCfAmCmGmAmGmUmCfAmUfCmCmCmAmUmC*mU*mG |
| Duplex NO: 644 | SEQ ID NO: 1674 | mA*mU*mGmGmGmAmUmGfAfCfUmCmGmUmGmGmCmCmC*mA*mA |
| | SEQ ID NO: 1675 | PmU*fU*mGmGfGmCfCmAmCmGmAmGmUfCmAfUmCmCmCmAmU*mC*mU |
| Duplex NO: 645 | SEQ ID NO: 1676 | mU*mG*mGmGmAmUmGmAfCfUfCmGmUmGmGmCmCmCmA*mG*mA |
| | SEQ ID NO: 1677 | PmU*fC*mUmGfGmGfCmCmAmCmGmAmGfUmCfAmUmCmCmCmA*mU*mC |
| Duplex NO: 646 | SEQ ID NO: 1678 | mG*mG*mGmAmUmGmAmCfUfCfGmUmGmGmCmCmCmAmG*mU*mA |
| | SEQ ID NO: 1679 | PmU*fA*mCmUfGmGfGmCmCmAmCmGmAfGmUfCmAmUmCmCmC*mA*mU |
| Duplex NO: 647 | SEQ ID NO: 1680 | mG*mU*mGmGmCmCmCmAfGfUfUmGmUmGmCmGmUmCmU*mU*mA |
| | SEQ ID NO: 1681 | PmU*fA*mAmGfAmCfGmCmAmCmAmAmCfUmGfGmGmCmCmAmC*mG*mA |
| Duplex NO: 648 | SEQ ID NO: 1682 | mU*mG*mGmCmCmCmAmGfUfUfGmUmGmCmGmUmCmUmU*mC*mA |
| | SEQ ID NO: 1683 | PmU*fG*mAmAfGmAfCmGmCmAmCmAmAfCmUfGmGmGmCmCmA*mC*mG |
| Duplex NO: 649 | SEQ ID NO: 1684 | mG*mC*mCmCmAmGmUmUfGfUfGmCmGmUmCmUmUmCmC*mA*mA |
| | SEQ ID NO: 1685 | PmU*fU*mGmGfAmAfGmAmCmGmCmAmCfAmAfCmUmGmGmGmC*mC*mA |
| Duplex NO: 650 | SEQ ID NO: 1686 | mC*mC*mCmAmGmUmUmGfUfGfCmGmUmCmUmUmCmCmA*mC*mA |
| | SEQ ID NO: 1687 | PmU*fG*mUmGfGmAfAmGmAmCmGmCmAfCmAfAmCmUmGmGmG*mC*mC |
| Duplex NO: 651 | SEQ ID NO: 1688 | mC*mC*mAmGmUmUmGmUfGfCfGmUmCmUmUmCmCmAmC*mG*mA |
| | SEQ ID NO: 1689 | PmU*fC*mGmUfGmGfAmAmGmAmCmGmCfAmCfAmAmCmUmGmG*mG*mC |
| Duplex NO: 652 | SEQ ID NO: 1690 | mC*mA*mGmUmUmGmUmGfCfGfUmCmUmUmCmCmAmCmG*mU*mA |
| | SEQ ID NO: 1691 | PmU*fA*mCmGfUmGfGmAmAmGmAmCmGfCmAfCmAmAmCmUmG*mG*mG |
| Duplex NO: 653 | SEQ ID NO: 1692 | mA*mG*mUmUmGmUmGmCfGfUfCmUmUmCmCmAmCmGmU*mG*mA |
| | SEQ ID NO: 1693 | PmU*fC*mAmCfGmUfGmGmAmAmGmAmCfGmCfAmCmAmAmCmU*mG*mG |
| Duplex NO: 654 | SEQ ID NO: 1694 | mU*mU*mGmUmGmAmCmUfCfUfGmCmAmGmAmAmGmUmG*mA*mA |
| | SEQ ID NO: 1695 | PmU*fU*mCmAfCmUfUmCmUmGmCmAmGfAmGfUmCmAmCmAmA*mG*mC |
| Duplex NO: 655 | SEQ ID NO: 1696 | mC*mU*mGmAmAmGmGmGfUfUfCmGmCmAmGmUmGmAmU*mA*mA |
| | SEQ ID NO: 1697 | PmU*fU*mAmUfCmAfCmUmGmCmGmAmAfCmCfCmUmUmCmAmG*mA*mU |
| Duplex NO: 656 | SEQ ID NO: 1698 | mU*mG*mAmAmGmGmGmUfUfCfGmCmAmGmUmGmAmUmA*mA*mA |
| | SEQ ID NO: 1699 | PmU*fU*mUmAfUmCfAmCmUmGmCmGmAfAmCfCmCmUmUmCmA*mG*mA |
| Duplex NO: 657 | SEQ ID NO: 1700 | mG*mA*mAmGmGmGmUmUfCfGfCmAmGmUmGmAmUmAmA*mA*mA |
| | SEQ ID NO: 1701 | PmU*fU*mUmUfAmUfCmAmCmUmGmCmGfAmAfCmCmCmUmUmC*mA*mG |
| Duplex NO: 658 | SEQ ID NO: 1702 | mA*mG*mGmGmUmUmCmGfCfAfGmUmGmAmUmAmAmAmG*mG*mA |
| | SEQ ID NO: 1703 | PmU*fC*mCmUfUmUfAmUmCmAmCmUmGfCmGfAmAmCmCmCmU*mU*mC |
| Duplex NO: 659 | SEQ ID NO: 1704 | mG*mG*mGmUmUmCmGmCfAfGfUmGmAmUmAmAmAmGmG*mA*mA |
| | SEQ ID NO: 1705 | PmU*fU*mCmCfUmUfUmAmUmCmAmCmUfGmCfGmAmAmCmCmC*mU*mU |
| Duplex NO: 660 | SEQ ID NO: 1706 | mU*mU*mCmGmCmAmGmUfGfAfUmAmAmAmGmGmAmGmG*mC*mA |
| | SEQ ID NO: 1707 | PmU*fG*mCmCfUmCfCmUmUmUmAmUmCfAmCfUmGmCmGmAmA*mC*mC |
| Duplex NO: 661 | SEQ ID NO: 1708 | mC*mA*mGmUmGmAmUmAfAfAfGmGmAmGmGmCmAmUmU*mU*mA |
| | SEQ ID NO: 1709 | PmU*fA*mAmAfUmGfCmCmUmCmCmUmUfUmAfUmCmAmCmUmG*mC*mG |
| Duplex NO: 662 | SEQ ID NO: 1710 | mC*mU*mAmGmCmAmGmAfUfUfUmGmCmAmCmGmUmCmU*mA*mA |
| | SEQ ID NO: 1711 | PmU*fU*mAmGfAmCfGmUmGmCmAmAmAfUmCfUmGmCmUmAmG*mU*mG |
| Duplex NO: 663 | SEQ ID NO: 1712 | mU*mA*mGmCmAmGmAmUfUfUfGmCmAmCmGmUmCmUmA*mC*mA |
| | SEQ ID NO: 1713 | PmU*fG*mUmAfGmAfCmGmUmGmCmAmAfAmUfCmUmGmCmUmA*mG*mU |
| Duplex NO: 664 | SEQ ID NO: 1714 | mA*mG*mCmAmGmAmUmUfUfGfCmAmCmGmUmCmUmAmC*mA*mA |
| | SEQ ID NO: 1715 | PmU*fU*mGmUfAmGfAmCmGmUmGmCmAfAmAfUmCmUmGmCmU*mA*mG |
| Duplex NO: 665 | SEQ ID NO: 1716 | mG*mC*mAmGmAmUmUmUfGfCfAmCmGmUmCmUmAmCmA*mG*mA |
| | SEQ ID NO: 1717 | PmU*fC*mUmGfUmAfGmAmCmGmUmGmCfAmAfAmUmCmUmGmC*mU*mA |
| Duplex NO: 666 | SEQ ID NO: 1718 | mC*mA*mGmAmUmUmUmGfCfAfCmGmUmCmUmAmCmAmG*mA*mA |
| | SEQ ID NO: 1719 | PmU*fU*mCmUfGmUfAmGmAmCmGmUmGfCmAfAmAmUmCmUmG*mC*mU |
| Duplex NO: 667 | SEQ ID NO: 1720 | mG*mA*mUmUmUmGmCmAfCfGfUmCmUmAmCmAmGmAmA*mA*mA |
| | SEQ ID NO: 1721 | PmU*fU*mUmUfCmUfGmUmAmGmAmCmGfUmGfCmAmAmAmUmC*mU*mG |
| Duplex NO: 668 | SEQ ID NO: 1722 | mA*mU*mUmUmGmCmAmCfGfUfCmUmAmCmAmGmAmAmA*mC*mA |
| | SEQ ID NO: 1723 | PmU*fG*mUmUfUmCfUmGmUmAmGmAmCfGmUfGmCmAmAmAmU*mC*mU |
| Duplex NO: 669 | SEQ ID NO: 1724 | mC*mU*mGmGmAmCmGmCfAfAfCmCmUmUmUmAmUmAmU*mC*mA |
| | SEQ ID NO: 1725 | PmU*fG*mAmUfAmUfAmAmAmGmGmUmUfGmCfGmUmCmCmAmG*mC*mU |
| Duplex NO: 670 | SEQ ID NO: 1726 | mU*mG*mGmAmCmGmCmAfAfCfCmUmUmUmAmUmAmUmC*mC*mA |
| | SEQ ID NO: 1727 | PmU*fG*mGmAfUmAfUmAmAmAmGmGmUfUmGfCmGmUmCmCmA*mG*mC |
| Duplex NO: 671 | SEQ ID NO: 1728 | mG*mG*mAmCmGmCmAmAfCfCfUmUmUmAmUmAmUmCmC*mG*mA |
| | SEQ ID NO: 1729 | PmU*fC*mGmGfAmUfAmUmAmAmAmGmGfUmUfGmCmGmUmCmC*mA*mG |
| Duplex NO: 672 | SEQ ID NO: 1730 | mG*mA*mCmGmCmAmAmCfCfUfUmUmAmUmAmUmCmCmG*mU*mA |
| | SEQ ID NO: 1731 | PmU*fA*mCmGfGmAfUmAmUmAmAmAmGfGmUfUmGmCmGmUmC*mC*mA |
| Duplex NO: 673 | SEQ ID NO: 1732 | mC*mG*mCmAmAmCmCmUfUfUfAmUmAmUmCmCmGmUmU*mU*mA |
| | SEQ ID NO: 1733 | PmU*fA*mAmAfCmGfGmAmUmAmUmAmAfAmGfGmUmUmGmCmG*mU*mC |
| Duplex NO: 674 | SEQ ID NO: 1734 | mG*mC*mAmAmCmCmUmUfUfAfUmAmUmCmCmGmUmUmU*mC*mA |
| | SEQ ID NO: 1735 | PmU*fG*mAmAfAmCfGmGmAmUmAmUmAfAmAfGmGmUmUmGmC*mG*mU |
| Duplex NO: 675 | SEQ ID NO: 1736 | mC*mA*mAmCmCmUmUmUfAfUfAmUmCmCmGmUmUmUmC*mC*mA |
| | SEQ ID NO: 1737 | PmU*fG*mGmAfAmAfCmGmGmAmUmAmUfAmAfAmGmGmUmUmG*mC*mG |
| Duplex NO: 676 | SEQ ID NO: 1738 | mC*mC*mUmUmUmAmUmAfUfCfCmGmUmUmUmCmCmAmG*mU*mA |
| | SEQ ID NO: 1739 | PmU*fA*mCmUfGmGfAmAmAmCmGmGmAfUmAfUmAmAmAmGmG*mU*mU |
| Duplex NO: 677 | SEQ ID NO: 1740 | mC*mU*mUmUmAmUmAmUfCfCfGmUmUmUmCmCmAmGmU*mC*mA |
| | SEQ ID NO: 1741 | PmU*fG*mAmCfUmGfGmAmAmAmCmGmGfAmUfAmUmAmAmAmG*mG*mU |
| Duplex NO: 678 | SEQ ID NO: 1742 | mU*mA*mUmCmCmGmUmUfUfCfCmAmGmUmCmCmAmGmG*mU*mA |
| | SEQ ID NO: 1743 | PmU*fA*mCmCfUmGfGmAmCmUmGmGmAfAmAfCmGmGmAmUmA*mU*mA |
| Duplex NO: 679 | SEQ ID NO: 1744 | mU*mU*mGmUmUmUmGmUfGfAfAmGmCmUmGmUmCmAmU*mU*mA |
| | SEQ ID NO: 1745 | PmU*fA*mAmUfGmAfCmAmGmCmUmUmCfAmCfAmAmAmCmAmA*mC*mA |
| Duplex NO: 680 | SEQ ID NO: 1746 | mU*mU*mUmGmUmGmAmAfGfCfUmGmUmCmAmUmUmCmC*mA*mA |
| | SEQ ID NO: 1747 | PmU*fU*mGmGfAmAfUmGmAmCmAmGmCfUmUfCmAmCmAmAmA*mC*mA |
| Duplex NO: 681 | SEQ ID NO: 1748 | mU*mU*mGmUmGmAmAmGfCfUfGmUmCmAmUmUmCmCmA*mG*mA |
| | SEQ ID NO: 1749 | PmU*fC*mUmGfGmAfAmUmGmAmCmAmGfCmUfUmCmAmCmAmA*mA*mC |
| Duplex NO: 682 | SEQ ID NO: 1750 | mG*mA*mAmGmCmUmGmUfCfAfUmUmCmCmAmGmCmCmA*mA*mA |
| | SEQ ID NO: 1751 | PmU*fU*mUmGfGmCfUmGmGmAmAmUmGfAmCfAmGmCmUmUmC*mA*mC |
| Duplex NO: 683 | SEQ ID NO: 1752 | mG*mC*mUmGmUmCmAmUfUfCfCmAmGmCmCmAmAmGmG*mU*mA |
| | SEQ ID NO: 1753 | PmU*fA*mCmCfUmUfGmGmCmUmGmGmAfAmUfGmAmCmAmGmC*mU*mU |
| Duplex NO: 684 | SEQ ID NO: 1754 | mC*mU*mGmUmCmAmUmUfCfCfAmGmCmCmAmAmGmGmU*mU*mA |
| | SEQ ID NO: 1755 | PmU*fA*mAmCfCmUfUmGmGmCmUmGmGfAmAfUmGmAmCmAmG*mC*mU |
| Duplex NO: 685 | SEQ ID NO: 1756 | mU*mG*mUmCmAmUmUmCfCfAfGmCmCmAmAmGmGmUmU*mG*mA |
| | SEQ ID NO: 1757 | PmU*fC*mAmAfCmCfUmUmGmGmCmUmGfGmAfAmUmGmAmCmA*mG*mC |
| Duplex NO: 686 | SEQ ID NO: 1758 | mG*mU*mCmAmUmUmCmCfAfGfCmCmAmAmGmGmUmUmG*mU*mA |
| | SEQ ID NO: 1759 | PmU*fA*mCmAfAmCfCmUmUmGmGmCmUfGmGfAmAmUmGmAmC*mA*mG |
| Duplex NO: 687 | SEQ ID NO: 1760 | mG*mC*mUmGmGmGmAmGfCfAfUmAmGmGmAmGmGmCmU*mA*mA |
| | SEQ ID NO: 1761 | PmU*fU*mAmGfCmCfUmCmCmUmAmUmGfCmUfCmCmCmAmGmC*mC*mA |
| Duplex NO: 688 | SEQ ID NO: 1762 | mC*mU*mGmGmGmAmGmCfAfUfAmGmGmAmGmGmCmUmA*mC*mA |
| | SEQ ID NO: 1763 | PmU*fG*mUmAfGmCfCmUmCmCmUmAmUfGmCfUmCmCmCmAmG*mC*mC |
| Duplex NO: 689 | SEQ ID NO: 1764 | mG*mG*mGmAmGmCmAmUfAfGfGmAmGmGmCmUmAmCmA*mA*mA |
| | SEQ ID NO: 1765 | PmU*fU*mUmGfUmAfGmCmCmUmCmCmUfAmUfGmCmUmCmCmC*mA*mG |
| Duplex NO: 690 | SEQ ID NO: 1766 | mG*mG*mAmGmCmAmUmAfGfGfAmGmGmCmUmAmCmAmA*mC*mA |
| | SEQ ID NO: 1767 | PmU*fG*mUmUfGmUfAmGmCmCmUmCmCfUmAfUmGmCmUmCmC*mC*mA |
| Duplex NO: 691 | SEQ ID NO: 1768 | mA*mG*mCmAmUmAmGmGfAfGfGmCmUmAmCmAmAmCmG*mC*mA |
| | SEQ ID NO: 1769 | PmU*fG*mCmGfUmUfGmUmAmGmCmCmUfCmCfUmAmUmGmCmU*mC*mC |
| Duplex NO: 692 | SEQ ID NO: 1770 | mG*mC*mAmUmAmGmGmAfGfGfCmUmAmCmAmAmCmGmC*mC*mA |
| | SEQ ID NO: 1771 | PmU*fG*mGmCfGmUfUmGmUmAmGmCmCfUmCfCmUmAmUmGmC*mU*mC |
| Duplex NO: 693 | SEQ ID NO: 1772 | mC*mA*mUmAmGmGmAmGfGfCfUmAmCmAmAmCmGmCmC*mC*mA |
| | SEQ ID NO: 1773 | PmU*fG*mGmGfCmGfUmUmGmUmAmGmCfCmUfCmCmUmAmUmG*mC*mU |
| Duplex NO: 694 | SEQ ID NO: 1774 | mA*mU*mAmGmGmAmGmGfCfUfAmCmAmAmCmGmCmCmC*mA*mA |
| | SEQ ID NO: 1775 | PmU*fU*mGmGfGmCfGmUmUmGmUmAmGfCmCfUmCmCmUmAmU*mG*mC |
| Duplex NO: 695 | SEQ ID NO: 1776 | mG*mA*mGmGmCmUmAmCfAfAfCmGmCmCmCmAmUmGmC*mA*mA |
| | SEQ ID NO: 1777 | PmU*fU*mGmCfAmUfGmGmGmCmGmUmUfGmUfAmGmCmCmUmC*mC*mU |
| Duplex NO: 696 | SEQ ID NO: 1778 | mG*mG*mCmUmAmCmAmAfCfGfCmCmCmAmUmGmCmAmG*mC*mA |
| | SEQ ID NO: 1779 | PmU*fG*mCmUfGmCfAmUmGmGmGmCmGfUmUfGmUmAmGmCmC*mU*mC |
| Duplex NO: 697 | SEQ ID NO: 1780 | mG*mC*mUmAmCmAmAmCfGfCfCmCmAmUmGmCmAmGmC*mA*mA |
| | SEQ ID NO: 1781 | PmU*fU*mGmCfUmGfCmAmUmGmGmGmCfGmUfUmGmUmAmGmC*mC*mU |
| Duplex NO: 698 | SEQ ID NO: 1782 | mC*mU*mAmCmAmAmCmGfCfCfCmAmUmGmCmAmGmCmA*mA*mA |
| | SEQ ID NO: 1783 | PmU*fU*mUmGfCmUfGmCmAmUmGmGmGfCmGfUmUmGmUmAmG*mC*mC |
| Duplex NO: 699 | SEQ ID NO: 1784 | mA*mC*mAmAmCmGmCmCfCfAfUmGmCmAmGmCmAmAmA*mC*mA |
| | SEQ ID NO: 1785 | PmU*fG*mUmUfUmGfCmUmGmCmAmUmGfGmGfCmGmUmUmGmU*mA*mG |
| Duplex NO: 700 | SEQ ID NO: 1786 | mC*mA*mAmCmGmCmCmCfAfUfGmCmAmGmCmAmAmAmC*mA*mA |
| | SEQ ID NO: 1787 | PmU*fU*mGmUfUmUfGmCmUmGmCmAmUfGmGfGmCmGmUmUmG*mU*mA |
| Duplex NO: 701 | SEQ ID NO: 1788 | mA*mA*mCmGmCmCmCmAfUfGfCmAmGmCmAmAmAmCmA*mU*mA |
| | SEQ ID NO: 1789 | PmU*fA*mUmGfUmUfUmGmCmUmGmCmAfUmGfGmGmCmGmUmU*mG*mU |
| Duplex NO: 702 | SEQ ID NO: 1790 | mC*mC*mCmAmUmGmCmAfGfCfAmAmAmCmAmUmUmGmU*mC*mA |
| | SEQ ID NO: 1791 | PmU*fG*mAmCfAmAfUmGmUmUmUmGmCfUmGfCmAmUmGmGmG*mC*mG |
| Duplex NO: 703 | SEQ ID NO: 1792 | mC*mU*mGmUmGmGmAmCfAfGfGmAmUmGmCmAmGmCmA*mC*mA |
| | SEQ ID NO: 1793 | PmU*fG*mUmGfCmUfGmCmAmUmCmCmUfGmUfCmCmAmCmAmG*mG*mC |
| Duplex NO: 704 | SEQ ID NO: 1794 | mG*mG*mAmUmGmCmAmGfCfAfCmAmGmAmAmUmGmUmU*mG*mA |
| | SEQ ID NO: 1795 | PmU*fC*mAmAfCmAfUmUmCmUmGmUmGfCmUfGmCmAmUmCmC*mU*mG |
| Duplex NO: 705 | SEQ ID NO: 1796 | mU*mU*mGmGmUmAmGmUfUfCfAmAmAmCmUmGmUmAmU*mU*mA |
| | SEQ ID NO: 1797 | PmU*fA*mAmUfAmCfAmGmUmUmUmGmAfAmCfUmAmCmCmAmA*mC*mA |
| Duplex NO: 706 | SEQ ID NO: 1798 | mU*mG*mGmUmAmGmUmUfCfAfAmAmCmUmGmUmAmUmU*mA*mA |
| | SEQ ID NO: 1799 | PmU*fU*mAmAfUmAfCmAmGmUmUmUmGfAmAfCmUmAmCmCmA*mA*mC |
| Duplex NO: 707 | SEQ ID NO: 1800 | mG*mG*mUmAmGmUmUmCfAfAfAmCmUmGmUmAmUmUmA*mC*mA |
| | SEQ ID NO: 1801 | PmU*fG*mUmAfAmUfAmCmAmGmUmUmUfGmAfAmCmUmAmCmC*mA*mA |
| Duplex NO: 708 | SEQ ID NO: 1802 | mG*mU*mAmUmUmAmCmUfUfUfAmAmUmGmGmAmAmGmC*mA*mA |
| | SEQ ID NO: 1803 | PmU*fU*mGmCfUmUfCmCmAmUmUmAmAfAmGfUmAmAmUmAmC*mA*mG |
| Duplex NO: 709 | SEQ ID NO: 1804 | mU*mA*mUmUmAmCmUmUfUfAfAmUmGmGmAmAmGmCmA*mA*mA |
| | SEQ ID NO: 1805 | PmU*fU*mUmGfCmUfUmCmCmAmUmUmAfAmAfGmUmAmAmUmA*mC*mA |
| Duplex NO: 710 | SEQ ID NO: 1806 | mU*mU*mAmCmUmUmUmAfAfUfGmGmAmAmGmCmAmAmG*mU*mA |
| | SEQ ID NO: 1807 | PmU*fA*mCmUfUmGfCmUmUmCmCmAmUfUmAfAmAmGmUmAmA*mU*mA |
| Duplex NO: 711 | SEQ ID NO: 1808 | mU*mA*mCmUmUmUmAmAfUfGfGmAmAmGmCmAmAmGmU*mG*mA |
| | SEQ ID NO: 1809 | PmU*fC*mAmCfUmUfGmCmUmUmCmCmAfUmUfAmAmAmGmUmA*mA*mU |
| Duplex NO: 712 | SEQ ID NO: 1810 | mG*mU*mCmCmCmAmCmAfAfAfUmGmAmAmGmAmUmUmU*mA*mA |
| | SEQ ID NO: 1811 | PmU*fU*mAmAfAmUfCmUmUmCmAmUmUfUmGfUmGmGmGmAmC*mC*mA |
| Duplex NO: 713 | SEQ ID NO: 1812 | mA*mA*mGmAmUmUmUmAfUfAfUmAmUmCmAmGmCmUmG*mC*mA |
| | SEQ ID NO: 1813 | PmU*fG*mCmAfGmCfUmGmAmUmAmUmAfUmAfAmAmUmCmUmU*mC*mA |
| Duplex NO: 714 | SEQ ID NO: 1814 | mU*mC*mAmGmCmUmGmCfAfCfCmAmUmGmCmCmAmUmC*mU*mA |
| | SEQ ID NO: 1815 | PmU*fA*mGmAfUmGfGmCmAmUmGmGmUfGmCfAmGmCmUmGmA*mU*mA |
| Duplex NO: 715 | SEQ ID NO: 1816 | mC*mA*mGmCmUmGmCmAfCfCfAmUmGmCmCmAmUmCmU*mA*mA |
| | SEQ ID NO: 1817 | PmU*fU*mAmGfAmUfGmGmCmAmUmGmGfUmGfCmAmGmCmUmG*mA*mU |
| Duplex NO: 716 | SEQ ID NO: 1818 | mA*mG*mCmUmGmCmAmCfCfAfUmGmCmCmAmUmCmUmA*mU*mA |
| | SEQ ID NO: 1819 | PmU*fA*mUmAfGmAfUmGmGmCmAmUmGfGmUfGmCmAmGmCmU*mG*mA |
| Duplex NO: 717 | SEQ ID NO: 1820 | mG*mC*mUmGmCmAmCmCfAfUfGmCmCmAmUmCmUmAmU*mA*mA |
| | SEQ ID NO: 1821 | PmU*fU*mAmUfAmGfAmUmGmGmCmAmUfGmGfUmGmCmAmGmC*mU*mG |
| Duplex NO: 718 | SEQ ID NO: 1822 | mC*mU*mGmCmAmCmCmAfUfGfCmCmAmUmCmUmAmUmA*mG*mA |
| | SEQ ID NO: 1823 | PmU*fC*mUmAfUmAfGmAmUmGmGmCmAfUmGfGmUmGmCmAmG*mC*mU |
| Duplex NO: 719 | SEQ ID NO: 1824 | mU*mG*mCmAmCmCmAmUfGfCfCmAmUmCmUmAmUmAmG*mA*mA |
| | SEQ ID NO: 1825 | PmU*fU*mCmUfAmUfAmGmAmUmGmGmCfAmUfGmGmUmGmCmA*mG*mC |
| Duplex NO: 720 | SEQ ID NO: 1826 | mG*mC*mAmCmCmAmUmGfCfCfAmUmCmUmAmUmAmGmA*mG*mA |
| | SEQ ID NO: 1827 | PmU*fC*mUmCfUmAfUmAmGmAmUmGmGfCmAfUmGmGmUmGmC*mA*mG |
| Duplex NO: 721 | SEQ ID NO: 1828 | mC*mA*mCmCmAmUmGmCfCfAfUmCmUmAmUmAmGmAmG*mA*mA |
| | SEQ ID NO: 1829 | PmU*fU*mCmUfCmUfAmUmAmGmAmUmGfGmCfAmUmGmGmUmG*mC*mA |
| Duplex NO: 722 | SEQ ID NO: 1830 | mA*mU*mGmCmCmAmUmCfUfAfUmAmGmAmGmAmUmAmG*mG*mA |
| | SEQ ID NO: 1831 | PmU*fC*mCmUfAmUfCmUmCmUmAmUmAfGmAfUmGmGmCmAmU*mG*mG |
| Duplex NO: 723 | SEQ ID NO: 1832 | mC*mU*mAmUmAmGmAmGfAfUfAmGmGmAmAmCmGmGmU*mG*mA |
| | SEQ ID NO: 1833 | PmU*fC*mAmCfCmGfUmUmCmCmUmAmUfCmUfCmUmAmUmAmG*mA*mU |
| Duplex NO: 724 | SEQ ID NO: 1834 | mU*mA*mUmAmGmAmGmAfUfAfGmGmAmAmCmGmGmUmG*mG*mA |
| | SEQ ID NO: 1835 | PmU*fC*mCmAfCmCfGmUmUmCmCmUmAfUmCfUmCmUmAmUmA*mG*mA |
| Duplex NO: 725 | SEQ ID NO: 1836 | mA*mU*mAmGmAmGmAmUfAfGfGmAmAmCmGmGmUmGmG*mG*mA |
| | SEQ ID NO: 1837 | PmU*fC*mCmCfAmCfCmGmUmUmCmCmUfAmUfCmUmCmUmAmU*mA*mG |
| Duplex NO: 726 | SEQ ID NO: 1838 | mU*mA*mCmUmAmCmCmUfCfAfGmCmAmAmGmCmCmUmG*mU*mA |
| | SEQ ID NO: 1839 | PmU*fA*mCmAfGmGfCmUmUmGmCmUmGfAmGfGmUmAmGmUmA*mG*mG |
| Duplex NO: 727 | SEQ ID NO: 1840 | mG*mU*mUmUmGmCmAmGfAfUfGmCmUmAmGmGmUmGmU*mU*mA |
| | SEQ ID NO: 1841 | PmU*fA*mAmCfAmCfCmUmAmGmCmAmUfCmUfGmCmAmAmAmC*mA*mG |
| Duplex NO: 728 | SEQ ID NO: 1842 | mU*mU*mCmAmAmGmGmAfGfCfAmUmGmCmAmAmAmGmA*mU*mA |
| | SEQ ID NO: 1843 | PmU*fA*mUmCfUmUfUmGmCmAmUmGmCfUmCfCmUmUmGmAmA*mC*mA |
| Duplex NO: 729 | SEQ ID NO: 1844 | mU*mC*mAmAmGmGmAmGfCfAfUmGmCmAmAmAmGmAmU*mA*mA |
| | SEQ ID NO: 1845 | PmU*fU*mAmUfCmUfUmUmGmCmAmUmGfCmUfCmCmUmUmGmA*mA*mC |
| Duplex NO: 730 | SEQ ID NO: 1846 | mC*mA*mAmGmGmAmGmCfAfUfGmCmAmAmAmGmAmUmA*mA*mA |
| | SEQ ID NO: 1847 | PmU*fU*mUmAfUmCfUmUmUmGmCmAmUfGmCfUmCmCmUmUmG*mA*mA |
| Duplex NO: 731 | SEQ ID NO: 1848 | mA*mA*mGmGmAmGmCmAfUfGfCmAmAmAmGmAmUmAmA*mU*mA |
| | SEQ ID NO: 1849 | PmU*fA*mUmUfAmUfCmUmUmUmGmCmAfUmGfCmUmCmCmUmU*mG*mA |
| Duplex NO: 732 | SEQ ID NO: 1850 | mA*mG*mGmAmGmCmAmUfGfCfAmAmAmGmAmUmAmAmU*mC*mA |
| | SEQ ID NO: 1851 | PmU*fG*mAmUfUmAfUmCmUmUmUmGmCfAmUfGmCmUmCmCmU*mU*mG |
| Duplex NO: 733 | SEQ ID NO: 1852 | mG*mG*mAmGmCmAmUmGfCfAfAmAmGmAmUmAmAmUmC*mC*mA |
| | SEQ ID NO: 1853 | PmU*fG*mGmAfUmUfAmUmCmUmUmUmGfCmAfUmGmCmUmCmC*mU*mU |
| Duplex NO: 734 | SEQ ID NO: 1854 | mU*mG*mCmCmCmGmGmCfAfGfCmUmUmGmCmCmCmGmA*mA*mA |
| | SEQ ID NO: 1855 | PmU*fU*mUmCfGmGfGmCmAmAmGmCmUfGmCfCmGmGmGmCmA*mU*mU |
| Duplex NO: 735 | SEQ ID NO: 1856 | mG*mG*mCmAmGmCmUmUfGfCfCmCmGmAmAmUmUmGmU*mG*mA |
| | SEQ ID NO: 1857 | PmU*fC*mAmCfAmAfUmUmCmGmGmGmCfAmAfGmCmUmGmCmC*mG*mG |
| Duplex NO: 736 | SEQ ID NO: 1858 | mG*mC*mAmGmCmUmUmGfCfCfCmGmAmAmUmUmGmUmG*mU*mA |
| | SEQ ID NO: 1859 | PmU*fA*mCmAfCmAfAmUmUmCmGmGmGfCmAfAmGmCmUmGmC*mC*mG |
| Duplex NO: 737 | SEQ ID NO: 1860 | mC*mA*mGmCmUmUmGmCfCfCfGmAmAmUmUmGmUmGmU*mG*mA |
| | SEQ ID NO: 1861 | PmU*fC*mAmCfAmCfAmAmUmUmCmGmGfGmCfAmAmGmCmUmG*mC*mC |
| Duplex NO: 738 | SEQ ID NO: 1862 | mG*mG*mCmAmGmCmAmUfUfGfGmCmAmGmCmAmGmGmA*mC*mA |
| | SEQ ID NO: 1863 | PmU*fG*mUmCfCmUfGmCmUmGmCmCmAfAmUfGmCmUmGmCmC*mA*mU |
| Duplex NO: 739 | SEQ ID NO: 1864 | mG*mC*mAmGmCmAmUmUfGfGfCmAmGmCmAmGmGmAmC*mA*mA |
| | SEQ ID NO: 1865 | PmU*fU*mGmUfCmCfUmGmCmUmGmCmCfAmAfUmGmCmUmGmC*mC*mA |
| Duplex NO: 740 | SEQ ID NO: 1866 | mC*mA*mGmCmAmUmUmGfGfCfAmGmCmAmGmGmAmCmA*mU*mA |
| | SEQ ID NO: 1867 | PmU*fA*mUmGfUmCfCmUmGmCmUmGmCfCmAfAmUmGmCmUmG*mC*mC |
| Duplex NO: 741 | SEQ ID NO: 1868 | mC*mA*mGmCmAmGmGmAfCfAfUmCmUmUmGmUmCmAmA*mA*mA |
| | SEQ ID NO: 1869 | PmU*fU*mUmUfGmAfCmAmAmGmAmUmGfUmCfCmUmGmCmUmG*mC*mC |
| Duplex NO: 742 | SEQ ID NO: 1870 | mA*mG*mCmAmGmGmAmCfAfUfCmUmUmGmUmCmAmAmA*mA*mA |
| | SEQ ID NO: 1871 | PmU*fU*mUmUfUmGfAmCmAmAmGmAmUfGmUfCmCmUmGmCmU*mG*mC |
| Duplex NO: 743 | SEQ ID NO: 1872 | mC*mA*mGmGmAmCmAmUfCfUfUmGmUmCmAmAmAmAmG*mU*mA |
| | SEQ ID NO: 1873 | PmU*fA*mCmUfUmUfUmGmAmCmAmAmGfAmUfGmUmCmCmUmG*mC*mU |
| Duplex NO: 744 | SEQ ID NO: 1874 | mA*mG*mGmAmCmAmUmCfUfUfGmUmCmAmAmAmAmGmU*mC*mA |
| | SEQ ID NO: 1875 | PmU*fG*mAmCfUmUfUmUmGmAmCmAmAfGmAfUmGmUmCmCmU*mG*mC |
| Duplex NO: 745 | SEQ ID NO: 1876 | mG*mG*mAmCmAmUmCmUfUfGfUmCmAmAmAmAmGmUmC*mA*mA |
| | SEQ ID NO: 1877 | PmU*fU*mGmAfCmUfUmUmUmGmAmCmAfAmGfAmUmGmUmCmC*mU*mG |
| Duplex NO: 746 | SEQ ID NO: 1878 | mU*mA*mAmGmUmCmUmGfGfGfAmUmGmUmAmGmAmAmC*mU*mA |
| | SEQ ID NO: 1879 | PmU*fA*mGmUfUmCfUmAmCmAmUmCmCfCmAfGmAmCmUmUmA*mA*mU |
| Duplex NO: 747 | SEQ ID NO: 1880 | mG*mC*mUmAmUmUmUmGfUfUfCmAmGmAmGmAmGmGmC*mC*mA |
| | SEQ ID NO: 1881 | PmU*fG*mGmCfCmUfCmUmCmUmGmAmAfCmAfAmAmUmAmGmC*mC*mU |
| Duplex NO: 748 | SEQ ID NO: 1882 | mC*mU*mAmUmUmUmGmUfUfCfAmGmAmGmAmGmGmCmC*mU*mA |
| | SEQ ID NO: 1883 | PmU*fA*mGmGfCmCfUmCmUmCmUmGmAfAmCfAmAmAmUmAmG*mC*mC |
| Duplex NO: 749 | SEQ ID NO: 1884 | mU*mU*mGmGmAmAmGmUfGfUfUmCmAmAmGmAmAmAmU*mA*mA |
| | SEQ ID NO: 1885 | PmU*fU*mAmUfUmUfCmUmUmGmAmAmCfAmCfUmUmCmCmAmA*mU*mA |
| Duplex NO: 750 | SEQ ID NO: 1886 | mU*mG*mGmAmAmGmUmGfUfUfCmAmAmGmAmAmAmUmA*mA*mA |
| | SEQ ID NO: 1887 | PmU*fU*mUmAfUmUfUmCmUmUmGmAmAfCmAfCmUmUmCmCmA*mA*mU |
| Duplex NO: 751 | SEQ ID NO: 1888 | mU*mG*mUmAmCmUmGmAfUfAfAmAmAmUmAmCmUmCmU*mA*mA |
| | SEQ ID NO: 1889 | PmU*fU*mAmGfAmGfUmAmUmUmUmUmAfUmCfAmGmUmAmCmA*mC*mA |
| Duplex NO: 752 | SEQ ID NO: 1890 | mA*mG*mGmAmAmAmCmCfCfUfGmGmCmUmUmGmCmUmU*mG*mA |
| | SEQ ID NO: 1891 | PmU*fC*mAmAfGmCfAmAmGmCmCmAmGfGmGfUmUmUmCmCmU*mG*mG |
| Duplex NO: 753 | SEQ ID NO: 1892 | mG*mU*mGmCmCmUmAmGfUfUfCmCmUmGmUmGmGmCmC*mA*mA |
| | SEQ ID NO: 1893 | PmU*fU*mGmGfCmCfAmCmAmGmGmAmAfCmUfAmGmGmCmAmC*mA*mG |
| Duplex NO: 754 | SEQ ID NO: 1894 | mG*mU*mUmCmCmUmGmUfGfGfCmCmAmGmGmAmGmGmU*mU*mA |
| | SEQ ID NO: 1895 | PmU*fA*mAmCfCmUfCmCmUmGmGmCmCfAmCfAmGmGmAmAmC*mU*mA |
| Duplex NO: 755 | SEQ ID NO: 1896 | mC*mU*mGmUmGmGmCmCfAfGfGmAmGmGmUmUmGmGmU*mG*mA |
| | SEQ ID NO: 1897 | PmU*fC*mAmCfCmAfAmCmCmUmCmCmUfGmGfCmCmAmCmAmG*mG*mA |
| Duplex NO: 756 | SEQ ID NO: 1898 | mG*mC*mCmAmGmGmAmGfGfUfUmGmGmUmGmAmCmUmG*mA*mA |
| | SEQ ID NO: 1899 | PmU*fU*mCmAfGmUfCmAmCmCmAmAmCfCmUfCmCmUmGmGmC*mC*mA |
| Duplex NO: 757 | SEQ ID NO: 1900 | mC*mA*mGmAmGmUmUmAfUfUfGmAmAmUmCmUmUmAmA*mU*mA |
| | SEQ ID NO: 1901 | PmU*fA*mUmUfAmAfGmAmUmUmCmAmAfUmAfAmCmUmCmUmG*mC*mU |
| Duplex NO: 758 | SEQ ID NO: 1902 | mA*mG*mAmGmUmUmAmUfUfGfAmAmUmCmUmUmAmAmU*mU*mA |
| | SEQ ID NO: 1903 | PmU*fA*mAmUfUmAfAmGmAmUmUmCmAfAmUfAmAmCmUmCmU*mG*mC |
| Duplex NO: 759 | SEQ ID NO: 1904 | mG*mA*mGmUmUmAmUmUfGfAfAmUmCmUmUmAmAmUmU*mU*mA |
| | SEQ ID NO: 1905 | PmU*fA*mAmAfUmUfAmAmGmAmUmUmCfAmAfUmAmAmCmUmC*mU*mG |
| Duplex NO: 760 | SEQ ID NO: 1906 | mU*mU*mUmUmUmAmAmUfGfUfAmCmAmAmGmUmUmUmU*mG*mA |
| | SEQ ID NO: 1907 | PmU*fC*mAmAfAmAfCmUmUmGmUmAmCfAmUfUmAmAmAmAmA*mA*mA |
| Duplex NO: 761 | SEQ ID NO: 1908 | mU*mU*mUmAmAmUmGmUfAfCfAmAmGmUmUmUmUmGmU*mA*mA |
| | SEQ ID NO: 1909 | PmU*fU*mAmCfAmAfAmAmCmUmUmGmUfAmCfAmUmUmAmAmA*mA*mA |
| Duplex NO: 762 | SEQ ID NO: 1910 | mA*mA*mAmUmAmAmUmAfAfAfGmAmAmCmUmCmCmUmU*mA*mA |
| | SEQ ID NO: 1911 | PmU*fU*mAmAfGmGfAmGmUmUmCmUmUfUmAfUmUmAmUmUmU*mA*mU |
| Duplex NO: 763 | SEQ ID NO: 1912 | mA*mA*mUmAmAmUmAmAfAfGfAmAmCmUmCmCmUmUmA*mU*mA |
| | SEQ ID NO: 1913 | PmU*fA*mUmAfAmGfGmAmGmUmUmCmUfUmUfAmUmUmAmUmU*mU*mA |
| Duplex NO: 764 | SEQ ID NO: 1914 | mA*mU*mAmAmUmAmAmAfGfAfAmCmUmCmCmUmUmAmU*mU*mA |
| | SEQ ID NO: 1915 | PmU*fA*mAmUfAmAfGmGmAmGmUmUmCfUmUfUmAmUmUmAmU*mU*mU |
| Duplex NO: 765 | SEQ ID NO: 1916 | mU*mA*mAmUmAmAmAmGfAfAfCmUmCmCmUmUmAmUmU*mU*mA |
| | SEQ ID NO: 1917 | PmU*fA*mAmAfUmAfAmGmGmAmGmUmUfCmUfUmUmAmUmUmA*mU*mU |
| Duplex NO: 766 | SEQ ID NO: 1918 | mA*mA*mUmAmAmAmGmAfAfCfUmCmCmUmUmAmUmUmU*mU*mA |
| | SEQ ID NO: 1919 | PmU*fA*mAmAfAmUfAmAmGmGmAmGmUfUmCfUmUmUmAmUmU*mA*mU |
| Duplex NO: 767 | SEQ ID NO: 1920 | mA*mC*mAmUmCmUmAmAfUfGfCmUmUmCmAmAmGmUmG*mU*mA |
| | SEQ ID NO: 1921 | PmU*fA*mCmAfCmUfUmGmAmAmGmCmAfUmUfAmGmAmUmGmU*mA*mA |
| Duplex NO: 768 | SEQ ID NO: 1922 | mU*mC*mUmGmAmGmCmUfUfUfUmCmAmUmGmGmAmAmG*mU*mA |
| | SEQ ID NO: 1923 | PmU*fA*mCmUfUmCfCmAmUmGmAmAmAfAmGfCmUmCmAmGmA*mA*mA |
| Duplex NO: 769 | SEQ ID NO: 1924 | mU*mG*mAmGmCmUmUmUfUfCfAmUmGmGmAmAmGmUmG*mG*mA |
| | SEQ ID NO: 1925 | PmU*fC*mCmAfCmUfUmCmCmAmUmGmAfAmAfAmGmCmUmCmA*mG*mA |
| Duplex NO: 770 | SEQ ID NO: 1926 | mA*mG*mCmUmUmUmUmCfAfUfGmGmAmAmGmUmGmGmC*mA*mA |
| | SEQ ID NO: 1927 | PmU*fU*mGmCfCmAfCmUmUmCmCmAmUfGmAfAmAmAmGmCmU*mC*mA |
| Duplex NO: 771 | SEQ ID NO: 1928 | mU*mU*mCmAmUmGmGmAfAfGfUmGmGmCmAmGmUmGmA*mA*mA |
| | SEQ ID NO: 1929 | PmU*fU*mUmCfAmCfUmGmCmCmAmCmUfUmCfCmAmUmGmAmA*mA*mA |
| Duplex NO: 772 | SEQ ID NO: 1930 | mU*mU*mAmAmUmGmUmUfUfUfGmUmAmCmAmAmUmUmA*mC*mA |
| | SEQ ID NO: 1931 | PmU*fG*mUmAfAmUfUmGmUmAmCmAmAfAmAfCmAmUmUmAmA*mU*mC |

P indicates a 5′ phosphate
m indicates 2′O-methyl modified ribose on the listed nucleotide
f indicates 2′F modified ribose on the listed nucleotide
*indicates a phosphorothioate bond (in place of a phosphodiester bond)

TABLE 4B
HMGCR RNAi agents, modified sense and antisense strands

| Duplex | | |
|---|---|---|
| NO: | SEQ ID NO: | Modified Sequence |
| Duplex | SEQ ID NO: 1160 | mG*mC*mUmAmCmAmAmUfGfUfUmGmUmCmAmAmGmAmC*mU*mA |
| NO: 773 | SEQ ID NO: 1932 | mU*fA*mGmUfCmUfUmGmAmCmAmAmCfAmUfUmGmUmAmGmC*mU*mA |
| Duplex | SEQ ID NO: 1162 | mC*mU*mAmCmAmAmUmGfUfUfGmUmCmAmAmGmAmCmU*mU*mA |
| NO: 774 | SEQ ID NO: 1933 | mU*fA*mAmGfUmCfUmUmGmAmCmAmAfCmAfUmUmGmUmAmG*mC*mU |
| Duplex | SEQ ID NO: 1164 | mA*mU*mGmAmUmGmUmCfCfAfUmGmAmAmCmAmUmGmU*mU*mA |
| NO: 775 | SEQ ID NO: 1934 | mU*fA*mAmCfAmUfGmUmUmCmAmUmGfGmAfCmAmUmCmAmU*mG*mC |
| D: 776 | SEQ ID NO: 1166 | mA*mU*mAmUmUmUmAmCfUfUfCmCmAmGmUmUmCmCmA*mG*mA |
| | SEQ ID NO: 1935 | mU*fC*mUmGfGmAfAmCmUmGmGmAmAfGmUfAmAmAmUmAmU*mA*mC |
| D: 777 | SEQ ID NO: 1168 | mA*mU*mUmUmAmCmUmUfCfCfAmGmUmUmCmCmAmGmA*mA*mA |
| | SEQ ID NO: 1936 | mU*fU*mUmCfUmGfGmAmAmCmUmGmGfAmAfGmUmAmAmAmU*mA*mU |
| D: 778 | SEQ ID NO: 1170 | mA*mA*mUmGmAmAmGmCfUfUfUmGmCmCmCmUmUmUmU*mU*mA |
| | SEQ ID NO: 1937 | mU*fA*mAmAfAmAfGmGmGmCmAmAmAfGmCfUmUmCmAmUmU*mC*mA |
| D: 779 | SEQ ID NO: 1172 | mC*mA*mCmAmUmUmAmGfCfAfAmAmGmUmUmUmGmCmC*mC*mA |
| | SEQ ID NO: 1938 | mU*fG*mGmGfCmAfAmAmCmUmUmUmGfCmUfAmAmUmGmUmG*mC*mU |
| D: 780 | SEQ ID NO: 1174 | mA*mC*mAmUmUmAmGmCfAfAfAmGmUmUmUmGmCmCmC*mU*mA |
| | SEQ ID NO: 1939 | mU*fA*mGmGfGmCfAmAmAmCmUmUmUfGmCfUmAmAmUmGmU*mG*mC |
| D: 781 | SEQ ID NO: 1176 | mC*mA*mUmUmAmGmCmAfAfAfGmUmUmUmGmCmCmCmU*mC*mA |
| | SEQ ID NO: 1940 | mU*fG*mAmGfGmGfCmAmAmAmCmUmUfUmGfCmUmAmAmUmG*mU*mG |
| D: 782 | SEQ ID NO: 1178 | mU*mA*mGmCmAmAmAmGfUfUfUmGmCmCmCmUmCmAmG*mU*mA |
| | SEQ ID NO: 1941 | mU*fA*mCmUfGmAfGmGmGmCmAmAmAfCmUfUmUmGmCmUmA*mA*mU |
| D: 783 | SEQ ID NO: 1180 | mG*mC*mAmAmAmGmUmUfUfGfCmCmCmUmCmAmGmUmU*mC*mA |
| | SEQ ID NO: 1942 | mU*fG*mAmAfCmUfGmAmGmGmGmCmAfAmAfCmUmUmUmGmC*mU*mA |
| D: 784 | SEQ ID NO: 1182 | mA*mC*mUmCmAmCmAmGfGfAfUmGmAmAmGmUmAmAmG*mG*mA |
| | SEQ ID NO: 1943 | mU*fC*mCmUfUmAfCmUmUmCmAmUmCfCmUfGmUmGmAmGmU*mU*mG |
| D: 785 | SEQ ID NO: 1184 | mC*mA*mCmAmGmGmAmUfGfAfAmGmUmAmAmGmGmGmA*mA*mA |
| | SEQ ID NO: 1944 | mU*fU*mUmCfCmCfUmUmAmCmUmUmCfAmUfCmCmUmGmUmG*mA*mG |
| D: 786 | SEQ ID NO: 1186 | mC*mA*mGmGmAmUmGmAfAfGfUmAmAmGmGmGmAmAmA*mA*mA |
| | SEQ ID NO: 1945 | mU*fU*mUmUfUmCfCmCmUmUmAmCmUfUmCfAmUmCmCmUmG*mU*mG |
| D: 787 | SEQ ID NO: 1188 | mA*mG*mGmAmUmGmAmAfGfUfAmAmGmGmGmAmAmAmA*mU*mA |
| | SEQ ID NO: 1946 | mU*fA*mUmUfUmUfCmCmCmUmUmAmCfUmUfCmAmUmCmCmU*mG*mU |
| D: 788 | SEQ ID NO: 1190 | mG*mC*mGmAmGmGmGmUfCfGfUmCmCmAmAmUmUmUmG*mG*mA |
| | SEQ ID NO: 1947 | mU*fC*mCmAfAmAfUmUmGmGmAmCmGfAmCfCmCmUmCmGmC*mG*mG |
| D: 789 | SEQ ID NO: 1192 | mC*mG*mAmGmGmGmUmCfGfUfCmCmAmAmUmUmUmGmG*mC*mA |
| | SEQ ID NO: 1948 | mU*fG*mCmCfAmAfAmUmUmGmGmAmCfGmAfCmCmCmUmCmG*mC*mG |
| D: 790 | SEQ ID NO: 1194 | mG*mA*mGmGmGmUmCmGfUfCfCmAmAmUmUmUmGmGmC*mA*mA |
| | SEQ ID NO: 1949 | mU*fU*mGmCfCmAfAmAmUmUmGmGmAfCmGfAmCmCmCmUmC*mG*mC |
| D: 791 | SEQ ID NO: 1196 | mG*mU*mCmGmUmCmCmAfAfUfUmUmGmGmCmAmGmCmU*mC*mA |
| | SEQ ID NO: 1950 | mU*fG*mAmGfCmUfGmCmCmAmAmAmUfUmGfGmAmCmGmAmC*mC*mC |
| D: 792 | SEQ ID NO: 1198 | mU*mC*mGmUmCmCmAmAfUfUfUmGmGmCmAmGmCmUmC*mA*mA |
| | SEQ ID NO: 1951 | mU*fU*mGmAfGmCfUmGmCmCmAmAmAfUmUfGmGmAmCmGmA*mC*mC |
| D: 793 | SEQ ID NO: 1200 | mC*mG*mUmCmCmAmAmUfUfUfGmGmCmAmGmCmUmCmA*mG*mA |
| | SEQ ID NO: 1952 | mU*fC*mUmGfAmGfCmUmGmCmCmAmAfAmUfUmGmGmAmCmG*mA*mC |
| D: 794 | SEQ ID NO: 1202 | mU*mC*mCmAmAmUmUmUfGfGfCmAmGmCmUmCmAmGmC*mC*mA |
| | SEQ ID NO: 1953 | mU*fG*mGmCfUmGfAmGmCmUmGmCmCfAmAfAmUmUmGmGmA*mC*mG |
| D: 795 | SEQ ID NO: 1204 | mA*mA*mUmUmUmGmGmCfAfGfCmUmCmAmGmCmCmAmU*mU*mA |
| | SEQ ID NO: 1954 | mU*fA*mAmUfGmGfCmUmGmAmGmCmUfGmCfCmAmAmAmUmU*mG*mG |
| D: 796 | SEQ ID NO: 1206 | mU*mU*mGmGmCmAmGmCfUfCfAmGmCmCmAmUmUmUmU*mG*mA |
| | SEQ ID NO: 1955 | mU*fC*mAmAfAmAfUmGmGmCmUmGmAfGmCfUmGmCmCmAmA*mA*mU |
| D: 797 | SEQ ID NO: 1208 | mU*mG*mGmCmAmGmCmUfCfAfGmCmCmAmUmUmUmUmG*mC*mA |
| | SEQ ID NO: 1956 | mU*fG*mCmAfAmAfAmUmGmGmCmUmGfAmGfCmUmGmCmCmA*mA*mA |
| D: 798 | SEQ ID NO: 1210 | mC*mC*mGmAmGmUmUmUfUfAfGmAmAmGmAmAmGmAmA*mG*mA |
| | SEQ ID NO: 1957 | mU*fC*mUmUfCmUfUmCmUmUmCmUmAfAmAfAmCmUmCmGmG*mG*mC |
| D: 799 | SEQ ID NO: 1212 | mA*mG*mAmGmGmGmUmCfAfAfGmAmUmGmAmUmUmAmU*mG*mA |
| | SEQ ID NO: 1958 | mU*fC*mAmUfAmAfUmCmAmUmCmUmUfGmAfCmCmCmUmCmU*mG*mA |
| D: 800 | SEQ ID NO: 1214 | mG*mG*mGmUmCmAmAmGfAfUfGmAmUmUmAmUmGmUmC*mU*mA |
| | SEQ ID NO: 1959 | mU*fA*mGmAfCmAfUmAmAmUmCmAmUfCmUfUmGmAmCmCmC*mU*mC |
| D: 801 | SEQ ID NO: 1216 | mA*mG*mUmCmGmCmUmGfGfAfUmAmGmCmUmGmAmUmC*mC*mA |
| | SEQ ID NO: 1960 | mU*fG*mGmAfUmCfAmGmCmUmAmUmCfCmAfGmCmGmAmCmU*mG*mU |
| D: 802 | SEQ ID NO: 1218 | mG*mU*mCmGmCmUmGmGfAfUfAmGmCmUmGmAmUmCmC*mU*mA |
| | SEQ ID NO: 1961 | mU*fA*mGmGfAmUfCmAmGmCmUmAmUfCmCfAmGmCmGmAmC*mU*mG |
| D: 803 | SEQ ID NO: 1220 | mU*mC*mGmCmUmGmGmAfUfAfGmCmUmGmAmUmCmCmU*mU*mA |
| | SEQ ID NO: 1962 | mU*fA*mAmGfGmAfUmCmAmGmCmUmAfUmCfCmAmGmCmGmA*mC*mU |
| D: 804 | SEQ ID NO: 1222 | mA*mA*mAmAmGmUmUmGfAfGfGmUmUmAmUmAmAmAmA*mC*mA |
| | SEQ ID NO: 1963 | mU*fG*mUmUfUmUfAmUmAmAmCmCmUfCmAfAmCmUmUmUmU*mC*mU |
| D: 805 | SEQ ID NO: 1224 | mA*mA*mAmGmUmUmGmAfGfGfUmUmAmUmAmAmAmAmC*mC*mA |
| | SEQ ID NO: 1964 | mU*fG*mGmUfUmUfUmAmUmAmAmCmCfUmCfAmAmCmUmUmU*mU*mC |
| D: 806 | SEQ ID NO: 1226 | mU*mG*mGmAmUmAmUmAfUfGfCmCmCmAmUmCmCmCmU*mG*mA |
| | SEQ ID NO: 1965 | mU*fC*mAmGfGmGfAmUmGmGmGmCmAfUmAfUmAmUmCmCmA*mA*mU |
| D: 807 | SEQ ID NO: 1228 | mG*mG*mAmUmAmUmAmUfGfCfCmCmAmUmCmCmCmUmG*mU*mA |
| | SEQ ID NO: 1966 | mU*fA*mCmAfGmGfGmAmUmGmGmGmCfAmUfAmUmAmUmCmC*mA*mA |
| D: 808 | SEQ ID NO: 1230 | mA*mU*mAmUmAmUmGmCfCfCfAmUmCmCmCmUmGmUmU*mG*mA |
| | SEQ ID NO: 1967 | mU*fC*mAmAfCmAfGmGmGmAmUmGmGfGmCfAmUmAmUmAmU*mC*mC |
| D: 809 | SEQ ID NO: 1232 | mU*mA*mUmAmUmGmCmCfCfAfUmCmCmCmUmGmUmUmG*mG*mA |
| | SEQ ID NO: 1968 | mU*fC*mCmAfAmCfAmGmGmGmAmUmGfGmGfCmAmUmAmUmA*mU*mC |
| D: 810 | SEQ ID NO: 1234 | mA*mU*mAmUmGmCmCmCfAfUfCmCmCmUmGmUmUmGmG*mA*mA |
| | SEQ ID NO: 1969 | mU*fU*mCmCfAmAfCmAmGmGmGmAmUfGmGfGmCmAmUmAmU*mA*mU |
| D: 811 | SEQ ID NO: 1236 | mU*mA*mUmGmCmCmCmAfUfCfCmCmUmGmUmUmGmGmA*mG*mA |
| | SEQ ID NO: 1970 | mU*fC*mUmCfCmAfAmCmAmGmGmGmAfUmGfGmGmCmAmUmA*mU*mA |
| D: 812 | SEQ ID NO: 1238 | mG*mG*mUmGmGmAmGmGfUfGfCmCmAmGmCmAmGmCmC*mG*mA |
| | SEQ ID NO: 1971 | mU*fC*mGmGfCmUfGmCmUmGmGmCmAfCmCfUmCmCmAmCmC*mA*mA |
| D: 813 | SEQ ID NO: 1240 | mG*mU*mCmCmUmUmGmCfAfGfAmUmGmGmGmAmUmGmA*mC*mA |
| | SEQ ID NO: 1972 | mU*fG*mUmCfAmUfCmCmCmAmUmCmUfGmCfAmAmGmGmAmC*mU*mC |
| D: 814 | SEQ ID NO: 1242 | mU*mC*mCmUmUmGmCmAfGfAfUmGmGmGmAmUmGmAmC*mU*mA |
| | SEQ ID NO: 1973 | mU*fA*mGmUfCmAfUmCmCmCmAmUmCfUmGfCmAmAmGmGmA*mC*mU |
| D: 815 | SEQ ID NO: 1244 | mC*mU*mUmGmCmAmGmAfUfGfGmGmAmUmGmAmCmUmC*mG*mA |
| | SEQ ID NO: 1974 | mU*fC*mGmAfGmUfCmAmUmCmCmCmAfUmCfUmGmCmAmAmG*mG*mA |
| D: 816 | SEQ ID NO: 1246 | mU*mG*mCmGmUmCmUmUfCfCfAmCmGmUmGmCmUmUmG*mU*mA |
| | SEQ ID NO: 1975 | mU*fA*mCmAfAmGfCmAmCmGmUmGmGfAmAfGmAmCmGmCmA*mC*mA |
| D: 817 | SEQ ID NO: 1248 | mG*mC*mGmUmCmUmUmCfCfAfCmGmUmGmCmUmUmGmU*mG*mA |
| | SEQ ID NO: 1976 | mU*fC*mAmCfAmAfGmCmAmCmGmUmGfGmAfAmGmAmCmGmC*mA*mC |
| D: 818 | SEQ ID NO: 1250 | mG*mU*mCmUmUmCmCmAfCfGfUmGmCmUmUmGmUmGmA*mC*mA |
| | SEQ ID NO: 1977 | mU*fG*mUmCfAmCfAmAmGmCmAmCmGfUmGfGmAmAmGmAmC*mG*mC |
| D: 819 | SEQ ID NO: 1252 | mC*mA*mCmGmUmGmCmUfUfGfUmGmAmCmUmCmUmGmC*mA*mA |
| | SEQ ID NO: 1978 | mU*fU*mGmCfAmGfAmGmUmCmAmCmAfAmGfCmAmCmGmUmG*mG*mA |
| D: 820 | SEQ ID NO: 1254 | mU*mG*mCmUmUmGmUmGfAfCfUmCmUmGmCmAmGmAmA*mG*mA |
| | SEQ ID NO: 1979 | mU*fC*mUmUfCmUfGmCmAmGmAmGmUfCmAfCmAmAmGmCmA*mC*mG |
| D: 821 | SEQ ID NO: 1256 | mU*mU*mUmAmUmAmUmCfCfGfUmUmUmCmCmAmGmUmC*mC*mA |
| | SEQ ID NO: 1980 | mU*fG*mGmAfCmUfGmGmAmAmAmCmGfGmAfUmAmUmAmAmA*mG*mG |
| D: 822 | SEQ ID NO: 1258 | mU*mU*mAmUmAmUmCmCfGfUfUmUmCmCmAmGmUmCmC*mA*mA |
| | SEQ ID NO: 1981 | mU*fU*mGmGfAmCfUmGmGmAmAmAmCfGmGfAmUmAmUmAmA*mA*mG |
| D: 823 | SEQ ID NO: 1260 | mA*mU*mAmUmCmCmGmUfUfUfCmCmAmGmUmCmCmAmG*mG*mA |
| | SEQ ID NO: 1982 | mU*fC*mCmUfGmGfAmCmUmGmGmAmAfAmCfGmGmAmUmAmU*mA*mA |
| D: 824 | SEQ ID NO: 1262 | mC*mU*mGmCmCmAmUmGfGfCfUmGmGmGmAmGmCmAmU*mA*mA |
| | SEQ ID NO: 1983 | mU*fU*mAmUfGmCfUmCmCmCmAmGmCfCmAfUmGmGmCmAmG*mA*mG |
| D: 825 | SEQ ID NO: 1264 | mU*mG*mCmCmAmUmGmGfCfUfGmGmGmAmGmCmAmUmA*mG*mA |
| | SEQ ID NO: 1984 | mU*fC*mUmAfUmGfCmUmCmCmCmAmGfCmCfAmUmGmGmCmA*mG*mA |
| D: 826 | SEQ ID NO: 1266 | mG*mC*mCmAmUmGmGmCfUfGfGmGmAmGmCmAmUmAmG*mG*mA |
| | SEQ ID NO: 1985 | mU*fC*mCmUfAmUfGmCmUmCmCmCmAfGmCfCmAmUmGmGmC*mA*mG |
| D: 827 | SEQ ID NO: 1268 | mA*mC*mAmGmGmAmUmGfCfAfGmCmAmCmAmGmAmAmU*mG*mA |
| | SEQ ID NO: 1986 | mU*fC*mAmUfUmCfUmGmUmGmCmUmGfCmAfUmCmCmUmGmU*mC*mC |
| D: 828 | SEQ ID NO: 1270 | mG*mU*mAmGmUmUmCmAfAfAfCmUmGmUmAmUmUmAmC*mU*mA |
| | SEQ ID NO: 1987 | mU*fA*mGmUfAmAfUmAmCmAmGmUmUfUmGfAmAmCmUmAmC*mC*mA |
| D: 829 | SEQ ID NO: 1272 | mG*mU*mUmCmAmAmAmCfUfGfUmAmUmUmAmCmUmUmU*mA*mA |
| | SEQ ID NO: 1988 | mU*fU*mAmAfAmGfUmAmAmUmAmCmAfGmUfUmUmGmAmAmC*mU*mA |
| D: 830 | SEQ ID NO: 1274 | mU*mU*mCmAmAmAmCmUfGfUfAmUmUmAmCmUmUmUmA*mA*mA |
| | SEQ ID NO: 1989 | mU*fU*mUmAfAmAfGmUmAmAmUmAmCfAmGfUmUmUmGmAmA*mC*mU |
| D: 831 | SEQ ID NO: 1276 | mU*mC*mAmAmAmCmUmGfUfAfUmUmAmCmUmUmUmAmA*mU*mA |
| | SEQ ID NO: 1990 | mU*fA*mUmUfAmAfAmGmUmAmAmUmAfCmAfGmUmUmUmGmA*mA*mC |
| D: 832 | SEQ ID NO: 1278 | mA*mA*mCmUmGmUmAmUfUfAfCmUmUmUmAmAmUmGmG*mA*mA |
| | SEQ ID NO: 1991 | mU*fU*mCmCfAmUfUmAmAmAmGmUmAfAmUfAmCmAmGmUmU*mU*mG |
| D: 833 | SEQ ID NO: 1280 | mA*mC*mUmGmUmAmUmUfAfCfUmUmUmAmAmUmGmGmA*mA*mA |
| | SEQ ID NO: 1992 | mU*Um*mUmCfCmAfUmUmAmAmAmGmUfAmAfUmAmCmAmGmU*mU*mU |
| D: 834 | SEQ ID NO: 1282 | mC*mU*mGmUmAmUmUmAfCfUfUmUmAmAmUmGmGmAmA*mG*mA |
| | SEQ ID NO: 1993 | mU*fC*mUmUfCmCfAmUmUmAmAmAmGfUmAfAmUmAmCmAmG*mU*mU |
| D: 835 | SEQ ID NO: 1284 | mU*mG*mUmAmUmUmAmCfUfUfUmAmAmUmGmGmAmAmG*mC*mA |
| | SEQ ID NO: 1994 | mU*fG*mCmUfUmCfCmAmUmUmAmAmAfGmUfAmAmUmAmCmA*mG*mU |
| D: 836 | SEQ ID NO: 1286 | mU*mU*mAmUmAmUmAmUfCfAfGmCmUmGmCmAmCmCmA*mU*mA |
| | SEQ ID NO: 1995 | mU*fA*mUmGfGmUfGmCmAmGmCmUmGfAmUfAmUmAmUmAmA*mA*mU |
| D: 837 | SEQ ID NO: 1288 | mU*mA*mUmAmUmAmUmCfAfGfCmUmGmCmAmCmCmAmU*mG*mA |
| | SEQ ID NO: 1996 | mU*fC*mAmUfGmGfUmGmCmAmGmCmUfGmAfUmAmUmAmUmA*mA*mA |
| D: 838 | SEQ ID NO: 1290 | mA*mU*mAmUmAmUmCmAfGfCfUmGmCmAmCmCmAmUmG*mC*mA |
| | SEQ ID NO: 1997 | mU*fG*mCmAfUmGfGmUmGmCmAmGmCfUmGfAmUmAmUmAmU*mA*mA |
| D: 839 | SEQ ID NO: 1292 | mU*mA*mUmAmUmCmAmGfCfUfGmCmAmCmCmAmUmGmC*mC*mA |
| | SEQ ID NO: 1998 | mU*fG*mGmCfAmUfGmGmUmGmCmAmGfCmUfGmAmUmAmUmA*mU*mA |
| D: 840 | SEQ ID NO: 1294 | mA*mU*mAmUmCmAmGmCfUfGfCmAmCmCmAmUmGmCmC*mA*mA |
| | SEQ ID NO: 1999 | mU*fU*mGmGfCmAfUmGmGmUmGmCmAfGmCfUmGmAmUmAmU*mA*mU |
| D: 841 | SEQ ID NO: 1296 | mA*mU*mCmAmGmCmUmGfCfAfCmCmAmUmGmCmCmAmU*mC*mA |
| | SEQ ID NO: 2000 | mU*fG*mAmUfGmGfCmAmUmGmGmUmGfCmAfGmCmUmGmAmU*mA*mU |
| D: 842 | SEQ ID NO: 1298 | mU*mU*mUmGmCmAmGmAfUfGfCmUmAmGmGmUmGmUmU*mC*mA |
| | SEQ ID NO: 2001 | mU*fG*mAmAfCmAfCmCmUmAmGmCmAfUmCfUmGmCmAmAmA*mC*mA |
| D: 843 | SEQ ID NO: 1300 | mU*mG*mCmAmGmAmUmGfCfUfAmGmGmUmGmUmUmCmA*mA*mA |
| | SEQ ID NO: 2002 | mU*fU*mUmGfAmAfCmAmCmCmUmAmGfCmAfUmCmUmGmCmA*mA*mA |
| D: 844 | SEQ ID NO: 1302 | mG*mC*mAmGmAmUmGmCfUfAfGmGmUmGmUmUmCmAmA*mG*mA |
| | SEQ ID NO: 2003 | mU*fC*mUmUfGmAfAmCmAmCmCmUmAfGmCfAmUmCmUmGmC*mA*mA |
| D: 845 | SEQ ID NO: 1304 | mC*mA*mGmAmUmGmCmUfAfGfGmUmGmUmUmCmAmAmG*mG*mA |
| | SEQ ID NO: 2004 | mU*fC*mCmUfUmGfAmAmCmAmCmCmUfAmGfCmAmUmCmUmG*mC*mA |
| D: 846 | SEQ ID NO: 1306 | mA*mG*mAmUmGmCmUmAfGfGfUmGmUmUmCmAmAmGmG*mA*mA |
| | SEQ ID NO: 2005 | mU*fU*mCmCfUmUfGmAmAmCmAmCmCfUmAfGmCmAmUmCmU*mG*mC |
| D: 847 | SEQ ID NO: 1308 | mG*mC*mUmAmGmGmUmGfUfUfCmAmAmGmGmAmGmCmA*mU*mA |
| | SEQ ID NO: 2006 | mU*fA*mUmGfCmUfCmCmUmUmGmAmAfCmAfCmCmUmAmGmC*mA*mU |
| D: 848 | SEQ ID NO: 1310 | mU*mA*mGmGmUmGmUmUfCfAfAmGmGmAmGmCmAmUmG*mC*mA |
| | SEQ ID NO: 2007 | mU*fG*mCmAfUmGfCmUmCmCmUmUmGfAmAfCmAmCmCmUmA*mG*mC |
| D: 849 | SEQ ID NO: 1312 | mA*mG*mGmUmGmUmUmCfAfAfGmGmAmGmCmAmUmGmC*mA*mA |
| | SEQ ID NO: 2008 | mU*fU*mGmCfAmUfGmCmUmCmCmUmUfGmAfAmCmAmCmCmU*mA*mG |
| D: 850 | SEQ ID NO: 1314 | mG*mG*mUmGmUmUmCmAfAfGfGmAmGmCmAmUmGmCmA*mA*mA |
| | SEQ ID NO: 2009 | mU*fU*mUmGfCmAfUmGmCmUmCmCmUfUmGfAmAmCmAmCmC*mU*mA |
| D: 851 | SEQ ID NO: 1316 | mU*mG*mUmUmCmAmAmGfGfAfGmCmAmUmGmCmAmAmA*mG*mA |
| | SEQ ID NO: 2010 | mU*fC*mUmUfUmGfCmAmUmGmCmUmCfCmUfUmGmAmAmCmA*mC*mC |
| D: 852 | SEQ ID NO: 1318 | mG*mU*mUmCmAmAmGmGfAfGfCmAmUmGmCmAmAmAmG*mA*mA |
| | SEQ ID NO: 2011 | mU*fU*mCmUfUmUfGmCmAmUmGmCmUfCmCfUmUmGmAmAmC*mA*mC |
| D: 853 | SEQ ID NO: 1320 | mC*mC*mCmGmGmCmAmGfCfUfUmGmCmCmCmGmAmAmU*mU*mA |
| | SEQ ID NO: 2012 | mU*fA*mAmUfUmCfGmGmGmCmAmAmGfCmUfGmCmCmGmGmG*mC*mA |
| D: 854 | SEQ ID NO: 1322 | mC*mG*mGmCmAmGmCmUfUfGfCmCmCmGmAmAmUmUmG*mU*mA |
| | SEQ ID NO: 2013 | mU*fA*mCmAfAmUfUmCmGmGmGmCmAfAmGfCmUmGmCmCmG*mG*mG |
| D: 855 | SEQ ID NO: 1324 | mC*mA*mUmUmGmGmCmAfGfCfAmGmGmAmCmAmUmCmU*mU*mA |
| | SEQ ID NO: 2014 | mU*fA*mAmGfAmUfGmUmCmCmUmGmCfUmGfCmCmAmAmUmG*mC*mU |
| D: 856 | SEQ ID NO: 1326 | mA*mU*mUmGmGmCmAmGfCfAfGmGmAmCmAmUmCmUmU*mG*mA |
| | SEQ ID NO: 2015 | mU*fC*mAmAfGmAfUmGmUmCmCmUmGfCmUfGmCmCmAmAmU*mG*mC |
| D: 857 | SEQ ID NO: 1328 | mU*mG*mGmCmAmGmCmAfGfGfAmCmAmUmCmUmUmGmU*mC*mA |
| | SEQ ID NO: 2016 | mU*fG*mAmCfAmAfGmAmUmGmUmCmCfUmGfCmUmGmCmCmA*mA*mU |
| D: 858 | SEQ ID NO: 1330 | mU*mA*mUmUmUmGmUmUfCfAfGmAmGmAmGmGmCmCmU*mU*mA |
| | SEQ ID NO: 2017 | mU*fA*mAmGfGmCfCmUmCmUmCmUmGfAmAfCmAmAmAmUmA*mG*mC |
| D: 859 | SEQ ID NO: 1332 | mU*mU*mAmCmUmAmAmAfGfAfUmAmUmCmAmGmAmGmC*mU*mA |
| | SEQ ID NO: 2018 | mU*fA*mGmCfUmCfUmGmAmUmAmUmCfUmUfUmAmGmUmAmA*mA*mG |
| D: 860 | SEQ ID NO: 1334 | mC*mA*mAmAmUmCmUmGfUfAfUmAmUmGmUmUmGmUmA*mA*mA |
| | SEQ ID NO: 2019 | mU*fU*mUmAfCmAfAmCmAmUmAmUmAfCmAfGmAmUmUmUmG*mA*mU |
| D: 861 | SEQ ID NO: 1336 | mA*mA*mAmUmCmUmGmUfAfUfAmUmGmUmUmGmUmAmA*mU*mA |
| | SEQ ID NO: 2020 | mU*fA*mUmUfAmCfAmAmCmAmUmAmUfAmCfAmGmAmUmUmU*mG*mA |
| D: 862 | SEQ ID NO: 1338 | mG*mU*mAmCmUmGmAmUfAfAfAmAmUmAmCmUmCmUmA*mG*mA |
| | SEQ ID NO: 2021 | mU*fC*mUmAfGmAfGmUmAmUmUmUmUfAmUfCmAmGmUmAmC*mA*mC |
| D: 863 | SEQ ID NO: 1340 | mU*mU*mGmUmCmCmAmGfGfAfAmAmCmCmCmUmGmGmC*mU*mA |
| | SEQ ID NO: 2022 | mU*fA*mGmCfCmAfGmGmGmUmUmUmCfCmUfGmGmAmCmAmA*mC*mA |
| D: 864 | SEQ ID NO: 1342 | mU*mC*mCmAmGmGmAmAfAfCfCmCmUmGmGmCmUmUmG*mC*mA |
| | SEQ ID NO: 2023 | mU*fG*mCmAfAmGfCmCmAmGmGmGmUfUmUfCmCmUmGmGmA*mC*mA |
| D: 865 | SEQ ID NO: 1344 | mU*mU*mGmUmAmGmAmAfGfAfUmGmGmAmCmUmCmUmG*mA*mA |
| | SEQ ID NO: 2024 | mU*fU*mCmAfGmAfGmUmCmCmAmUmCfUmUfCmUmAmCmAmA*mG*mA |
| D: 866 | SEQ ID NO: 1346 | mU*mG*mUmAmGmAmAmGfAfUfGmGmAmCmUmCmUmGmA*mA*mA |
| | SEQ ID NO: 2025 | mU*fU*mUmCfAmGfAmGmUmCmCmAmUfCmUfUmCmUmAmCmA*mA*mG |
| D: 867 | SEQ ID NO: 1348 | mU*mA*mAmUmGmUmUmUfUfGfUmAmCmAmAmUmUmAmC*mU*mA |
| | SEQ ID NO: 2026 | mU*fA*mGmUfAmAfUmUmGmUmAmCmAfAmAfAmCmAmUmUmA*mA*mU |
| D: 868 | SEQ ID NO: 1350 | mU*mA*mUmAmCmAmUmUfUfUfGmUmUmAmUmAmGmAmA*mU*mA |
| | SEQ ID NO: 2027 | mU*fA*mUmUfCmUfAmUmAmAmCmAmAfAmAfUmGmUmAmUmA*mC*mA |
| D: 869 | SEQ ID NO: 1352 | mU*mA*mCmAmUmUmUmUfGfUfUmAmUmAmGmAmAmUmA*mC*mA |
| | SEQ ID NO: 2028 | mU*fG*mUmAfUmUfCmUmAmUmAmAmCfAmAfAmAmUmGmUmA*mU*mA |
| D: 870 | SEQ ID NO: 1354 | mA*mC*mAmUmUmUmUmGfUfUfAmUmAmGmAmAmUmAmC*mU*mA |
| | SEQ ID NO: 2029 | mU*fA*mGmUfAmUfUmCmUmAmUmAmAfCmAfAmAmAmUmGmU*mA*mU |
| D: 871 | SEQ ID NO: 1356 | mC*mA*mAmUmGmUmUmGfUfCfAmAmGmAmCmUmUmUmU*mU*mA |
| | SEQ ID NO: 2030 | mU*fA*mAmAfAmAfGmUmCmUmUmGmAfCmAfAmCmAmUmUmG*mU*mA |
| D: 872 | SEQ ID NO: 1358 | mA*mA*mUmGmUmUmGmUfCfAfAmGmAmCmUmUmUmUmU*mC*mA |
| | SEQ ID NO: 2031 | mU*fG*mAmAfAmAfAmGmUmCmUmUmGfAmCfAmAmCmAmUmU*mG*mU |
| D: 873 | SEQ ID NO: 1360 | mA*mU*mGmUmUmGmUmCfAfAfGmAmCmUmUmUmUmUmC*mG*mA |
| | SEQ ID NO: 2032 | mU*fC*mGmAfAmAfAmAmGmUmCmUmUfGmAfCmAmAmCmAmU*mU*mG |
| D: 874 | SEQ ID NO: 1362 | mU*mC*mUmGmCmAmUmGfAfUfGmUmCmCmAmUmGmAmA*mC*mA |
| | SEQ ID NO: 2033 | mU*fG*mUmUfCmAfUmGmGmAmCmAmUfCmAfUmGmCmAmGmA*mU*mG |
| D: 875 | SEQ ID NO: 1364 | mC*mU*mGmCmAmUmGmAfUfGfUmCmCmAmUmGmAmAmC*mA*mA |
| | SEQ ID NO: 2034 | mU*fU*mGmUfUmCfAmUmGmGmAmCmAfUmCfAmUmGmCmAmG*mA*mU |
| D: 876 | SEQ ID NO: 1366 | mU*mA*mAmGmAmUmCmUfGfUfGmGmUmUmGmGmAmAmU*mU*mA |
| | SEQ ID NO: 2035 | mU*fA*mAmUfUmCfCmAmAmCmCmAmCfAmGfAmUmCmUmUmA*mU*mU |
| D: 877 | SEQ ID NO: 1368 | mA*mA*mGmAmUmCmUmGfUfGfGmUmUmGmGmAmAmUmU*mA*mA |
| | SEQ ID NO: 2036 | mU*fU*mAmAfUmUfCmCmAmAmCmCmAfCmAfGmAmUmCmUmU*mA*mU |
| D: 878 | SEQ ID NO: 1370 | mA*mG*mAmUmCmUmGmUfGfGfUmUmGmGmAmAmUmUmA*mU*mA |
| | SEQ ID NO: 2037 | mU*fA*mUmAfAmUfUmCmCmAmAmCmCfAmCfAmGmAmUmCmU*mU*mA |
| D: 879 | SEQ ID NO: 1372 | mU*mG*mUmAmUmAmUmUfUfAfCmUmUmCmCmAmGmUmU*mC*mA |
| | SEQ ID NO: 2038 | mU*fG*mAmAfCmUfGmGmAmAmGmUmAfAmAfUmAmUmAmCmA*mG*mG |
| D: 880 | SEQ ID NO: 1374 | mG*mU*mAmUmAmUmUmUfAfCfUmUmCmCmAmGmUmUmC*mC*mA |
| | SEQ ID NO: 2039 | mU*fG*mGmAfAmCfUmGmGmAmAmGmUfAmAfAmUmAmUmAmC*mA*mG |
| D: 881 | SEQ ID NO: 1376 | mU*mA*mUmAmUmUmUmAfCfUfUmCmCmAmGmUmUmCmC*mA*mA |
| | SEQ ID NO: 2040 | mU*fU*mGmGfAmAfCmUmGmGmAmAmGfUmAfAmAmUmAmUmA*mC*mA |
| D: 882 | SEQ ID NO: 1378 | mU*mU*mUmAmCmUmUmCfCfAfGmUmUmCmCmAmGmAmA*mU*mA |
| | SEQ ID NO: 2041 | mU*fA*mUmUfCmUfGmGmAmAmCmUmGfGmAfAmGmUmAmAmA*mU*mA |
| D: 883 | SEQ ID NO: 1380 | mU*mA*mUmUmUmUmGmGfGfUfAmUmUmGmCmUmGmGmC*mC*mA |
| | SEQ ID NO: 2042 | mU*fG*mGmCfCmAfGmCmAmAmUmAmCfCmCfAmAmAmAmUmA*mU*mA |
| D: 884 | SEQ ID NO: 1382 | mU*mA*mUmUmCmAmGmUfAfCfAmGmUmUmGmUmCmAmU*mU*mA |
| | SEQ ID NO: 2043 | mU*fA*mAmUfGmAfCmAmAmCmUmGmUfAmCfUmGmAmAmUmA*mC*mA |
| D: 885 | SEQ ID NO: 1384 | mA*mU*mUmCmAmGmUmAfCfAfGmUmUmGmUmCmAmUmU*mC*mA |
| | SEQ ID NO: 2044 | mU*fG*mAmAfUmGfAmCmAmAmCmUmGfUmAfCmUmGmAmAmU*mA*mC |
| D: 886 | SEQ ID NO: 1386 | mA*mG*mAmCmAmAmAmGfAfAfUmUmGmAmCmAmGmGmC*mU*mA |
| | SEQ ID NO: 2045 | mU*fA*mGmCfCmUfGmUmCmAmAmUmUfCmUfUmUmGmUmCmU*mA*mA |
| D: 887 | SEQ ID NO: 1388 | mG*mA*mCmAmAmAmGmAfAfUfUmGmAmCmAmGmGmCmU*mU*mA |
| | SEQ ID NO: 2046 | mU*fA*mAmGfCmCfUmGmUmCmAmAmUfUmCfUmUmUmGmUmC*mU*mA |
| D: 888 | SEQ ID NO: 1390 | mG*mC*mUmUmGmAmAmUfGfAfAmGmCmUmUmUmGmCmC*mC*mA |
| | SEQ ID NO: 2047 | mU*fG*mGmGfCmAfAmAmGmCmUmUmCfAmUfUmCmAmAmGmC*mC*mU |
| D: 889 | SEQ ID NO: 1392 | mC*mU*mUmGmAmAmUmGfAfAfGmCmUmUmUmGmCmCmC*mU*mA |
| | SEQ ID NO: 2048 | mU*fA*mGmGfGmCfAmAmAmGmCmUmUfCmAfUmUmCmAmAmG*mC*mC |
| D: 890 | SEQ ID NO: 1394 | mU*mU*mGmAmAmUmGmAfAfGfCmUmUmUmGmCmCmCmU*mU*mA |
| | SEQ ID NO: 2049 | mU*fA*mAmGfGmGfCmAmAmAmGmCmUfUmCfAmUmUmCmAmA*mG*mC |
| D: 891 | SEQ ID NO: 1396 | mA*mU*mGmAmAmGmCmUfUfUfGmCmCmCmUmUmUmUmU*mC*mA |
| | SEQ ID NO: 2050 | mU*fG*mAmAfAmAfAmGmGmGmCmAmAfAmGfCmUmUmCmAmU*mU*mC |
| D: 892 | SEQ ID NO: 1398 | mC*mA*mAmAmGmUmUmUfGfCfCmCmUmCmAmGmUmUmC*mC*mA |
| | SEQ ID NO: 2051 | mU*fG*mGmAfAmCfUmGmAmGmGmGmCfAmAfAmCmUmUmUmG*mC*mU |
| D: 893 | SEQ ID NO: 1400 | mA*mA*mGmUmUmUmGmCfCfCfUmCmAmGmUmUmCmCmA*mA*mA |
| | SEQ ID NO: 2052 | mU*fU*mUmGfGmAfAmCmUmGmAmGmGfGmCfAmAmAmCmUmU*mU*mG |
| D: 894 | SEQ ID NO: 1402 | mC*mA*mAmCmUmCmAmCfAfGfGmAmUmGmAmAmGmUmA*mA*mA |
| | SEQ ID NO: 2053 | mU*fU*mUmAfCmUfUmCmAmUmCmCmUfGmUfGmAmGmUmUmG*mG*mA |
| D: 895 | SEQ ID NO: 1404 | mA*mA*mCmUmCmAmCmAfGfGfAmUmGmAmAmGmUmAmA*mG*mA |
| | SEQ ID NO: 2054 | mU*fC*mUmUfAmCfUmUmCmAmUmCmCfUmGfUmGmAmGmUmU*mG*mG |
| D: 896 | SEQ ID NO: 1406 | mG*mA*mAmGmUmAmAmGfGfGfAmAmAmAmUmAmUmUmG*mC*mA |
| | SEQ ID NO: 2055 | mU*fG*mCmAfAmUfAmUmUmUmUmCmCfCmUfUmAmCmUmUmC*mA*mU |
| D: 897 | SEQ ID NO: 1408 | mA*mA*mGmUmAmAmGmGfGfAfAmAmAmUmAmUmUmGmC*mU*mA |
| | SEQ ID NO: 2056 | mU*fA*mGmCfAmAfUmAmUmUmUmUmCfCmCfUmUmAmCmUmU*mC*mA |
| D: 898 | SEQ ID NO: 1410 | mG*mU*mAmAmGmGmGmAfAfAfAmUmAmUmUmGmCmUmC*mG*mA |
| | SEQ ID NO: 2057 | mU*fC*mGmAfGmCfAmAmUmAmUmUmUfUmCfCmCmUmUmAmC*mU*mU |
| D: 899 | SEQ ID NO: 1412 | mA*mA*mGmGmGmAmAmAfAfUfAmUmUmGmCmUmCmGmU*mG*mA |
| | SEQ ID NO: 2058 | mU*fC*mAmCfGmAfGmCmAmAmUmAmUfUmUfUmCmCmCmUmU*mA*mC |
| D: 900 | SEQ ID NO: 1414 | mA*mG*mGmGmAmAmAmAfUfAfUmUmGmCmUmCmGmUmG*mG*mA |
| | SEQ ID NO: 2059 | mU*fC*mCmAfCmGfAmGmCmAmAmUmAfUmUfUmUmCmCmCmU*mU*mA |
| D: 901 | SEQ ID NO: 1416 | mG*mG*mGmAmAmAmAmUfAfUfUmGmCmUmCmGmUmGmG*mA*mA |
| | SEQ ID NO: 2060 | mU*fU*mCmCfAmCfGmAmGmCmAmAmUfAmUfUmUmUmCmCmC*mU*mU |
| D: 902 | SEQ ID NO: 1418 | mG*mG*mAmAmAmAmUmAfUfUfGmCmUmCmGmUmGmGmA*mA*mA |
| | SEQ ID NO: 2061 | mU*fU*mUmCfCmAfCmGmAmGmCmAmAfUmAfUmUmUmUmCmC*mC*mU |
| D: 903 | SEQ ID NO: 1420 | mA*mA*mAmUmAmUmUmGfCfUfCmGmUmGmGmAmAmUmG*mG*mA |
| | SEQ ID NO: 2062 | mU*fC*mCmAfUmUfCmCmAmCmGmAmGfCmAfAmUmAmUmUmU*mU*mC |
| D: 904 | SEQ ID NO: 1422 | mA*mA*mUmAmUmUmGmCfUfCfGmUmGmGmAmAmUmGmG*mC*mA |
| | SEQ ID NO: 2063 | mU*fG*mCmCfAmUfUmCmCmAmCmGmAfGmCfAmAmUmAmUmU*mU*mU |
| D: 905 | SEQ ID NO: 1424 | mA*mU*mAmUmUmGmCmUfCfGfUmGmGmAmAmUmGmGmC*mA*mA |
| | SEQ ID NO: 2064 | mU*fU*mGmCfCmAfUmUmCmCmAmCmGfAmGfCmAmAmUmAmU*mU*mU |
| D: 906 | SEQ ID NO: 1426 | mU*mA*mUmUmGmCmUmCfGfUfGmGmAmAmUmGmGmCmA*mA*mA |
| | SEQ ID NO: 2065 | mU*fU*mUmGfCmCfAmUmUmCmCmAmCfGmAfGmCmAmAmUmA*mU*mU |
| D: 907 | SEQ ID NO: 1428 | mA*mU*mUmGmCmUmCmGfUfGfGmAmAmUmGmGmCmAmA*mU*mA |
| | SEQ ID NO: 2066 | mU*fA*mUmUfGmCfCmAmUmUmCmCmAfCmGfAmGmCmAmAmU*mA*mU |
| D: 908 | SEQ ID NO: 1430 | mU*mU*mGmCmUmCmGmUfGfGfAmAmUmGmGmCmAmAmU*mU*mA |
| | SEQ ID NO: 2067 | mU*fA*mAmUfUmGfCmCmAmUmUmCmCfAmCfGmAmGmCmAmA*mU*mA |
| D: 909 | SEQ ID NO: 1432 | mU*mU*mGmAmAmUmGmUfCfUfUmGmUmGmAmUmUmGmG*mA*mA |
| | SEQ ID NO: 2068 | mU*fU*mCmCfAmAfUmCmAmCmAmAmGfAmCfAmUmUmCmAmA*mC*mA |
| D: 910 | SEQ ID NO: 1434 | mU*mG*mAmAmUmGmUmCfUfUfGmUmGmAmUmUmGmGmA*mG*mA |
| | SEQ ID NO: 2069 | mU*fC*mUmCfCmAfAmUmCmAmCmAmAfGmAfCmAmUmUmCmA*mA*mC |
| D: 911 | SEQ ID NO: 1436 | mU*mC*mUmUmGmUmGmAfUfUfGmGmAmGmUmUmGmGmU*mA*mA |
| | SEQ ID NO: 2070 | mU*fU*mAmCfCmAfAmCmUmCmCmAmAfUmCfAmCmAmAmGmA*mC*mA |
| D: 912 | SEQ ID NO: 1438 | mC*mU*mUmGmUmGmAmUfUfGfGmAmGmUmUmGmGmUmA*mC*mA |
| | SEQ ID NO: 2071 | mU*fG*mUmAfCmCfAmAmCmUmCmCmAfAmUfCmAmCmAmAmG*mA*mC |
| D: 913 | SEQ ID NO: 1440 | mU*mU*mGmUmGmAmUmUfGfGfAmGmUmUmGmGmUmAmC*mC*mA |
| | SEQ ID NO: 2072 | mU*fG*mGmUfAmCfCmAmAmCmUmCmCfAmAfUmCmAmCmAmA*mG*mA |
| D: 914 | SEQ ID NO: 1442 | mG*mU*mGmAmUmUmGmGfAfGfUmUmGmGmUmAmCmCmA*mU*mA |
| | SEQ ID NO: 2073 | mU*fA*mUmGfGmUfAmCmCmAmAmCmUfCmCfAmAmUmCmAmC*mA*mA |
| D: 915 | SEQ ID NO: 1444 | mG*mA*mUmUmGmGmAmGfUfUfGmGmUmAmCmCmAmUmG*mU*mA |
| | SEQ ID NO: 2074 | mU*fA*mCmAfUmGfGmUmAmCmCmAmAfCmUfCmCmAmAmUmC*mA*mC |
| D: 916 | SEQ ID NO: 1446 | mA*mU*mUmGmGmAmGmUfUfGfGmUmAmCmCmAmUmGmU*mC*mA |
| | SEQ ID NO: 2075 | mU*fG*mAmCfAmUfGmGmUmAmCmCmAfAmCfUmCmCmAmAmU*mC*mA |
| D: 917 | SEQ ID NO: 1448 | mU*mG*mGmAmGmUmUmGfGfUfAmCmCmAmUmGmUmCmA*mG*mA |
| | SEQ ID NO: 2076 | mU*fC*mUmGfAmCfAmUmGmGmUmAmCfCmAfAmCmUmCmCmA*mA*mU |
| D: 918 | SEQ ID NO: 1450 | mG*mG*mAmGmUmUmGmGfUfAfCmCmAmUmGmUmCmAmG*mG*mA |
| | SEQ ID NO: 2077 | mU*fC*mCmUfGmAfCmAmUmGmGmUmAfCmCfAmAmCmUmCmC*mA*mA |
| D: 919 | SEQ ID NO: 1452 | mU*mA*mUmGmUmGmCmUfGfCfUmUmUmGmGmCmUmGmC*mA*mA |
| | SEQ ID NO: 2078 | mU*fU*mGmCfAmGfCmCmAmAmAmGmCfAmGfCmAmCmAmUmA*mA*mU |
| D: 920 | SEQ ID NO: 1454 | mU*mU*mGmCmCmAmAmCfUfAfCmUmUmCmGmUmGmUmU*mC*mA |
| | SEQ ID NO: 2079 | mU*fG*mAmAfCmAfCmGmAmAmGmUmAfGmUfUmGmGmCmAmA*mG*mA |
| D: 921 | SEQ ID NO: 1456 | mU*mG*mCmCmAmAmCmUfAfCfUmUmCmGmUmGmUmUmC*mA*mA |
| | SEQ ID NO: 2080 | mU*fU*mGmAfAmCfAmCmGmAmAmGmUfAmGfUmUmGmGmCmA*mA*mG |
| D: 922 | SEQ ID NO: 1458 | mG*mC*mCmAmAmCmUmAfCfUfUmCmGmUmGmUmUmCmA*mU*mA |
| | SEQ ID NO: 2081 | mU*fA*mUmGfAmAfCmAmCmGmAmAmGfUmAfGmUmUmGmGmC*mA*mA |
| D: 923 | SEQ ID NO: 1460 | mC*mC*mAmAmCmUmAmCfUfUfCmGmUmGmUmUmCmAmU*mG*mA |
| | SEQ ID NO: 2082 | mU*fC*mAmUfGmAfAmCmAmCmGmAmAfGmUfAmGmUmUmGmG*mC*mA |
| D: 924 | SEQ ID NO: 1462 | mA*mA*mCmUmAmCmUmUfCfGfUmGmUmUmCmAmUmGmA*mC*mA |
| | SEQ ID NO: 2083 | mU*fG*mUmCfAmUfGmAmAmCmAmCmGfAmAfGmUmAmGmUmU*mG*mG |
| D: 925 | SEQ ID NO: 1464 | mA*mU*mUmAmGmAmGmCfUfUfUmCmUmCmGmGmGmAmA*mA*mA |
| | SEQ ID NO: 2084 | mU*fU*mUmUfCmCfCmGmAmGmAmAmAfGmCfUmCmUmAmAmU*mA*mC |
| D: 926 | SEQ ID NO: 1466 | mU*mU*mAmGmAmGmCmUfUfUfCmUmCmGmGmGmAmAmA*mG*mA |
| | SEQ ID NO: 2085 | mU*fC*mUmUfUmCfCmCmGmAmGmAmAfAmGfCmUmCmUmAmA*mU*mA |
| D: 927 | SEQ ID NO: 1468 | mU*mA*mGmAmGmCmUmUfUfCfUmCmGmGmGmAmAmAmG*mC*mA |
| | SEQ ID NO: 2086 | mU*fG*mCmUfUmUfCmCmCmGmAmGmAfAmAfGmCmUmCmUmA*mA*mU |
| D: 928 | SEQ ID NO: 1470 | mG*mA*mGmCmUmUmUmCfUfCfGmGmGmAmAmAmGmCmC*mG*mA |
| | SEQ ID NO: 2087 | mU*fC*mGmGfCmUfUmUmCmCmCmGmAfGmAfAmAmGmCmUmC*mU*mA |
| D: 929 | SEQ ID NO: 1472 | mG*mG*mGmAmAmAmGmCfCfGfCmGmAmGmGmGmUmCmG*mU*mA |
| | SEQ ID NO: 2088 | mU*fA*mCmGfAmCfCmCmUmCmGmCmGfGmCfUmUmUmCmCmC*mG*mA |
| D: 930 | SEQ ID NO: 1474 | mG*mG*mAmAmAmGmCmCfGfCfGmAmGmGmGmUmCmGmU*mC*mA |
| | SEQ ID NO: 2089 | mU*fG*mAmCfGmAfCmCmCmUmCmGmCfGmGfCmUmUmUmCmC*mC*mG |
| D: 931 | SEQ ID NO: 1476 | mG*mA*mAmAmGmCmCmGfCfGfAmGmGmGmUmCmGmUmC*mC*mA |
| | SEQ ID NO: 2090 | mU*fG*mGmAfCmGfAmCmCmCmUmCmGfCmGfGmCmUmUmUmC*mC*mC |
| D: 932 | SEQ ID NO: 1478 | mA*mA*mAmGmCmCmGmCfGfAfGmGmGmUmCmGmUmCmC*mA*mA |
| | SEQ ID NO: 2091 | mU*fU*mGmGfAmCfGmAmCmCmCmUmCfGmCfGmGmCmUmUmU*mC*mC |
| D: 933 | SEQ ID NO: 1480 | mA*mA*mGmCmCmGmCmGfAfGfGmGmUmCmGmUmCmCmA*mA*mA |
| | SEQ ID NO: 2092 | mU*fU*mUmGfGmAfCmGmAmCmCmCmUfCmGfCmGmGmCmUmU*mU*mC |
| D: 934 | SEQ ID NO: 1482 | mA*mG*mCmCmGmCmGmAfGfGfGmUmCmGmUmCmCmAmA*mU*mA |
| | SEQ ID NO: 2093 | mU*fA*mUmUfGmGfAmCmGmAmCmCmCfUmCfGmCmGmGmCmU*mU*mU |
| D: 935 | SEQ ID NO: 1484 | mG*mC*mCmGmCmGmAmGfGfGfUmCmGmUmCmCmAmAmU*mU*mA |
| | SEQ ID NO: 2094 | mU*fA*mAmUfUmGfGmAmCmGmAmCmCfCmUfCmGmCmGmGmC*mU*mU |
| D: 936 | SEQ ID NO: 1486 | mC*mC*mGmCmGmAmGmGfGfUfCmGmUmCmCmAmAmUmU*mU*mA |
| | SEQ ID NO: 2095 | mU*fA*mAmAfUmUfGmGmAmCmGmAmCfCmCfUmCmGmCmGmG*mC*mU |
| D: 937 | SEQ ID NO: 1488 | mC*mG*mCmGmAmGmGmGfUfCfGmUmCmCmAmAmUmUmU*mG*mA |
| | SEQ ID NO: 2096 | mU*fC*mAmAfAmUfUmGmGmAmCmGmAfCmCfCmUmCmGmCmG*mG*mC |
| D: 938 | SEQ ID NO: 1490 | mC*mC*mCmGmAmGmUmUfUfUfAmGmAmAmGmAmAmGmA*mA*mA |
| | SEQ ID NO: 2097 | mU*fU*mUmCfUmUfCmUmUmCmUmAmAfAmAfCmUmCmGmGmG*mC*mA |
| D: 939 | SEQ ID NO: 1492 | mC*mU*mCmAmGmAmGmGfGfUfCmAmAmGmAmUmGmAmU*mU*mA |
| | SEQ ID NO: 2098 | mU*fA*mAmUfCmAfUmCmUmUmGmAmCfCmCfUmCmUmGmAmG*mU*mU |
| D: 940 | SEQ ID NO: 1494 | mG*mG*mUmCmAmAmGmAfUfGfAmUmUmAmUmGmUmCmU*mC*mA |
| | SEQ ID NO: 2099 | mU*fG*mAmGfAmCfAmUmAmAmUmCmAfUmCfUmUmGmAmCmC*mC*mU |
| D: 941 | SEQ ID NO: 1496 | mG*mU*mCmAmAmGmAmUfGfAfUmUmAmUmGmUmCmUmC*mU*mA |
| | SEQ ID NO: 2100 | mU*fA*mGmAfGmAfCmAmUmAmAmUmCfAmUfCmUmUmGmAmC*mC*mC |
| D: 942 | SEQ ID NO: 1498 | mC*mA*mAmGmAmUmGmAfUfUfAmUmGmUmCmUmCmUmA*mG*mA |
| | SEQ ID NO: 2101 | mU*fC*mUmAfGmAfGmAmCmAmUmAmAfUmCfAmUmCmUmUmG*mA*mC |
| D: 943 | SEQ ID NO: 1500 | mA*mA*mGmAmUmGmAmUfUfAfUmGmUmCmUmCmUmAmG*mG*mA |
| | SEQ ID NO: 2102 | mU*fC*mCmUfAmGfAmGmAmCmAmUmAfAmUfCmAmUmCmUmU*mG*mA |
| D: 944 | SEQ ID NO: 1502 | mA*mG*mAmUmGmAmUmUfAfUfGmUmCmUmCmUmAmGmG*mC*mA |
| | SEQ ID NO: 2103 | mU*fG*mCmCfUmAfGmAmGmAmCmAmUfAmAfUmCmAmUmCmU*mU*mG |
| D: 945 | SEQ ID NO: 1504 | mG*mA*mUmGmAmUmUmAfUfGfUmCmUmCmUmAmGmGmC*mU*mA |
| | SEQ ID NO: 2104 | mU*fA*mGmCfCmUfAmGmAmGmAmCmAfUmAfAmUmCmAmUmC*mU*mU |
| D: 946 | SEQ ID NO: 1506 | mA*mU*mGmAmUmUmAmUfGfUfCmUmCmUmAmGmGmCmU*mU*mA |
| | SEQ ID NO: 2105 | mU*fA*mAmGfCmCfUmAmGmAmGmAmCfAmUfAmAmUmCmAmU*mC*mU |
| D: 947 | SEQ ID NO: 1508 | mU*mG*mAmUmUmAmUmGfUfCfUmCmUmAmGmGmCmUmU*mG*mA |
| | SEQ ID NO: 2106 | mU*fC*mAmAfGmCfCmUmAmGmAmGmAfCmAfUmAmAmUmCmA*mU*mC |
| D: 948 | SEQ ID NO: 1510 | mA*mU*mGmCmUmCmAmCfAfGfUmCmGmCmUmGmGmAmU*mA*mA |
| | SEQ ID NO: 2107 | mU*fU*mAmUfCmCfAmGmCmGmAmCmUfGmUfGmAmGmCmAmU*mG*mA |
| D: 949 | SEQ ID NO: 1512 | mU*mG*mCmUmCmAmCmAfGfUfCmGmCmUmGmGmAmUmA*mG*mA |
| | SEQ ID NO: 2108 | mU*fC*mUmAfUmCfCmAmGmCmGmAmCfUmGfUmGmAmGmCmA*mU*mG |
| D: 950 | SEQ ID NO: 1514 | mG*mC*mUmCmAmCmAmGfUfCfGmCmUmGmGmAmUmAmG*mC*mA |
| | SEQ ID NO: 2109 | mU*fG*mCmUfAmUfCmCmAmGmCmGmAfCmUfGmUmGmAmGmC*mA*mU |
| D: 951 | SEQ ID NO: 1516 | mC*mU*mCmAmCmAmGmUfCfGfCmUmGmGmAmUmAmGmC*mU*mA |
| | SEQ ID NO: 2110 | mU*fA*mGmCfUmAfUmCmCmAmGmCmGfAmCfUmGmUmGmAmG*mC*mA |
| D: 952 | SEQ ID NO: 1518 | mU*mC*mAmCmAmGmUmCfGfCfUmGmGmAmUmAmGmCmU*mG*mA |
| | SEQ ID NO: 2111 | mU*fC*mAmGfCmUfAmUmCmCmAmGmCfGmAfCmUmGmUmGmA*mG*mC |
| D: 953 | SEQ ID NO: 1520 | mC*mA*mCmAmGmUmCmGfCfUfGmGmAmUmAmGmCmUmG*mA*mA |
| | SEQ ID NO: 2112 | mU*fU*mCmAfGmCfUmAmUmCmCmAmGfCmGfAmCmUmGmUmG*mA*mG |
| D: 954 | SEQ ID NO: 1522 | mG*mA*mAmUmUmGmAmAfCfCfAmAmGmUmGmUmUmUmC*mC*mA |
| | SEQ ID NO: 2113 | mU*fG*mGmAfAmAfCmAmCmUmUmGmGfUmUfCmAmAmUmUmC*mU*mC |
| D: 955 | SEQ ID NO: 1524 | mG*mA*mAmCmCmAmAmGfUfGfUmUmUmCmCmCmUmCmU*mG*mA |
| | SEQ ID NO: 2114 | mU*fC*mAmGfAmGfGmGmAmAmAmCmAfCmUfUmGmGmUmUmC*mA*mA |
| D: 956 | SEQ ID NO: 1526 | mA*mA*mAmUmGmAmUmCfAfGfCmAmUmGmGmAmUmAmU*mU*mA |
| | SEQ ID NO: 2115 | mU*fA*mAmUfAmUfCmCmAmUmGmCmUfGmAfUmCmAmUmUmU*mU*mA |
| D: 957 | SEQ ID NO: 1528 | mA*mU*mGmAmUmCmAmGfCfAfUmGmGmAmUmAmUmUmG*mA*mA |
| | SEQ ID NO: 2116 | mU*fU*mCmAfAmUfAmUmCmCmAmUmGfCmUfGmAmUmCmAmU*mU*mU |
| D: 958 | SEQ ID NO: 1530 | mU*mC*mUmCmCmUmUmCfUfGfGmCmUmGmUmCmAmAmG*mU*mA |
| | SEQ ID NO: 2117 | mU*fA*mCmUfUmGfAmCmAmGmCmCmAfGmAfAmGmGmAmGmA*mG*mC |
| D: 959 | SEQ ID NO: 1532 | mC*mU*mCmCmUmUmCmUfGfGfCmUmGmUmCmAmAmGmU*mA*mA |
| | SEQ ID NO: 2118 | mU*fU*mAmCfUmUfGmAmCmAmGmCmCfAmGfAmAmGmGmAmG*mA*mG |
| D: 960 | SEQ ID NO: 1534 | mA*mA*mCmAmGmAmGmAfCfAfGmAmAmUmCmUmAmCmA*mC*mA |
| | SEQ ID NO: 2119 | mU*fG*mUmGfUmAfGmAmUmUmCmUmGfUmCfUmCmUmGmUmU*mU*mG |
| D: 961 | SEQ ID NO: 1536 | mA*mC*mAmGmAmGmAmCfAfGfAmAmUmCmUmAmCmAmC*mU*mA |
| | SEQ ID NO: 2120 | mU*fA*mGmUfGmUfAmGmAmUmUmCmUfGmUfCmUmCmUmGmU*mU*mU |
| D: 962 | SEQ ID NO: 1538 | mA*mU*mUmGmUmUmGmUfAfGfAmCmGmUmGmAmAmCmC*mU*mA |
| | SEQ ID NO: 2121 | mU*fA*mGmGfUmUfCmAmCmGmUmCmUfAmCfAmAmCmAmAmU*mU*mG |
| D: 963 | SEQ ID NO: 1540 | mA*mA*mGmUmUmGmAmGfGfUfUmAmUmAmAmAmAmCmC*mC*mA |
| | SEQ ID NO: 2122 | mU*fG*mGmGfUmUfUmUmAmUmAmAmCfCmUfCmAmAmCmUmU*mU*mU |
| D: 964 | SEQ ID NO: 1542 | mG*mU*mUmGmAmGmGmUfUfAfUmAmAmAmAmCmCmCmU*mU*mA |
| | SEQ ID NO: 2123 | mU*fA*mAmGfGmGfUmUmUmUmAmUmAfAmCfCmUmCmAmAmC*mU*mU |
| D: 965 | SEQ ID NO: 1544 | mU*mU*mGmAmGmGmUmUfAfUfAmAmAmAmCmCmCmUmU*mA*mA |
| | SEQ ID NO: 2124 | mU*fU*mAmAfGmGfGmUmUmUmUmAmUfAmAfCmCmUmCmAmA*mC*mU |
| D: 966 | SEQ ID NO: 1546 | mU*mG*mAmGmGmUmUmAfUfAfAmAmAmCmCmCmUmUmA*mG*mA |
| | SEQ ID NO: 2125 | mU*fC*mUmAfAmGfGmGmUmUmUmUmAfUmAfAmCmCmUmCmA*mA*mC |
| D: 967 | SEQ ID NO: 1548 | mG*mC*mAmGmAmGmAmAfAfGfGmUmGmCmAmAmAmAmU*mU*mA |
| | SEQ ID NO: 2126 | mU*fA*mAmUfUmUfUmGmCmAmCmCmUfUmUfCmUmCmUmGmC*mA*mU |
| D: 968 | SEQ ID NO: 1550 | mC*mA*mGmAmGmAmAmAfGfGfUmGmCmAmAmAmAmUmU*mC*mA |
| | SEQ ID NO: 2127 | mU*fG*mAmAfUmUfUmUmGmCmAmCmCfUmUfUmCmUmCmUmG*mC*mA |
| D: 969 | SEQ ID NO: 1552 | mA*mG*mAmGmAmAmAmGfGfUfGmCmAmAmAmAmUmUmC*mC*mA |
| | SEQ ID NO: 2128 | mU*fG*mGmAfAmUfUmUmUmGmCmAmCfCmUfUmUmCmUmCmU*mG*mC |
| D: 970 | SEQ ID NO: 1554 | mG*mA*mGmAmAmAmGmGfUfGfCmAmAmAmAmUmUmCmC*mU*mA |
| | SEQ ID NO: 2129 | mU*fA*mGmGfAmAfUmUmUmUmGmCmAfCmCfUmUmUmCmUmC*mU*mG |
| D: 971 | SEQ ID NO: 1556 | mA*mG*mAmAmAmGmGmUfGfCfAmAmAmAmUmUmCmCmU*mU*mA |
| | SEQ ID NO: 2130 | mU*fA*mAmGfGmAfAmUmUmUmUmGmCfAmCfCmUmUmUmCmU*mC*mU |
| D: 972 | SEQ ID NO: 1558 | mG*mA*mAmAmGmGmUmGfCfAfAmAmAmUmUmCmCmUmU*mA*mA |
| | SEQ ID NO: 2131 | mU*fU*mAmAfGmGfAmAmUmUmUmUmGfCmAfCmCmUmUmUmC*mU*mC |
| D: 973 | SEQ ID NO: 1560 | mA*mA*mAmGmGmUmGmCfAfAfAmAmUmUmCmCmUmUmA*mG*mA |
| | SEQ ID NO: 2132 | mU*fC*mUmAfAmGfGmAmAmUmUmUmUfGmCfAmCmCmUmUmU*mC*mU |
| D: 974 | SEQ ID NO: 1562 | mA*mA*mGmGmUmGmCmAfAfAfAmUmUmCmCmUmUmAmG*mU*mA |
| | SEQ ID NO: 2133 | mU*fA*mCmUfAmAfGmGmAmAmUmUmUfUmGfCmAmCmCmUmU*mU*mC |
| D: 975 | SEQ ID NO: 1564 | mA*mG*mGmUmGmCmAmAfAfAfUmUmCmCmUmUmAmGmU*mG*mA |
| | SEQ ID NO: 2134 | mU*fC*mAmCfUmAfAmGmGmAmAmUmUfUmUfGmCmAmCmCmU*mU*mU |
| D: 976 | SEQ ID NO: 1566 | mU*mG*mCmAmAmAmAmUfUfCfCmUmUmAmGmUmGmAmU*mG*mA |
| | SEQ ID NO: 2135 | mU*fC*mAmUfCmAfCmUmAmAmGmGmAfAmUfUmUmUmGmCmA*mC*mC |
| D: 977 | SEQ ID NO: 1568 | mG*mC*mAmAmAmAmUmUfCfCfUmUmAmGmUmGmAmUmG*mC*mA |
| | SEQ ID NO: 2136 | mU*fG*mCmAfUmCfAmCmUmAmAmGmGfAmAfUmUmUmUmGmC*mA*mC |
| D: 978 | SEQ ID NO: 1570 | mA*mA*mUmUmCmCmUmUfAfGfUmGmAmUmGmCmUmGmA*mG*mA |
| | SEQ ID NO: 2137 | mU*fC*mUmCfAmGfCmAmUmCmAmCmUfAmAfGmGmAmAmUmU*mU*mU |
| D: 979 | SEQ ID NO: 1572 | mU*mC*mCmUmUmAmGmUfGfAfUmGmCmUmGmAmGmAmU*mC*mA |
| | SEQ ID NO: 2138 | mU*fG*mAmUfCmUfCmAmGmCmAmUmCfAmCfUmAmAmGmGmA*mA*mU |
| D: 980 | SEQ ID NO: 1574 | mC*mC*mUmUmAmGmUmGfAfUfGmCmUmGmAmGmAmUmC*mA*mA |
| | SEQ ID NO: 2139 | mU*fU*mGmAfUmCfUmCmAmGmCmAmUfCmAfCmUmAmAmGmG*mA*mA |
| D: 981 | SEQ ID NO: 1576 | mC*mU*mGmAmGmAmUmCfAfUfCmCmAmGmUmUmAmGmU*mC*mA |
| | SEQ ID NO: 2140 | mU*fG*mAmCfUmAfAmCmUmGmGmAmUfGmAfUmCmUmCmAmG*mC*mA |
| D: 982 | SEQ ID NO: 1578 | mU*mG*mAmGmAmUmCmAfUfCfCmAmGmUmUmAmGmUmC*mA*mA |
| | SEQ ID NO: 2141 | mU*fU*mGmAfCmUfAmAmCmUmGmGmAfUmGfAmUmCmUmCmA*mG*mC |
| D: 983 | SEQ ID NO: 1580 | mG*mA*mGmAmUmCmAmUfCfCfAmGmUmUmAmGmUmCmA*mA*mA |
| | SEQ ID NO: 2142 | mU*fU*mUmGfAmCfUmAmAmCmUmGmGfAmUfGmAmUmCmUmC*mA*mG |
| D: 984 | SEQ ID NO: 1582 | mA*mU*mCmAmUmCmCmAfGfUfUmAmGmUmCmAmAmUmG*mC*mA |
| | SEQ ID NO: 2143 | mU*fG*mCmAfUmUfGmAmCmUmAmAmCfUmGfGmAmUmGmAmU*mC*mU |
| D: 985 | SEQ ID NO: 1584 | mG*mU*mCmAmAmUmGmCfUfAfAmGmCmAmUmAmUmCmC*mC*mA |
| | SEQ ID NO: 2144 | mU*fG*mGmGfAmUfAmUmGmCmUmUmAfGmCfAmUmUmGmAmC*mU*mA |
| D: 986 | SEQ ID NO: 1586 | mC*mU*mAmAmGmCmAmUfAfUfCmCmCmAmGmCmCmUmA*mC*mA |
| | SEQ ID NO: 2145 | mU*fG*mUmAfGmGfCmUmGmGmGmAmUfAmUfGmCmUmUmAmG*mC*mA |
| D: 987 | SEQ ID NO: 1588 | mA*mA*mGmCmAmUmAmUfCfCfCmAmGmCmCmUmAmCmA*mA*mA |
| | SEQ ID NO: 2146 | mU*fU*mUmGfUmAfGmGmCmUmGmGmGfAmUfAmUmGmCmUmU*mA*mG |
| D: 988 | SEQ ID NO: 1590 | mU*mG*mGmAmAmAmCmUfCfUfGmAmUmGmGmAmAmAmC*mU*mA |
| | SEQ ID NO: 2147 | mU*fA*mGmUfUmUfCmCmAmUmCmAmGfAmGfUmUmUmCmCmA*mA*mC |
| D: 989 | SEQ ID NO: 1592 | mG*mG*mAmAmAmCmUmCfUfGfAmUmGmGmAmAmAmCmU*mC*mA |
| | SEQ ID NO: 2148 | mU*fG*mAmGfUmUfUmCmCmAmUmCmAfGmAfGmUmUmUmCmC*mA*mA |
| D: 990 | SEQ ID NO: 1594 | mG*mA*mAmAmCmUmCmUfGfAfUmGmGmAmAmAmCmUmC*mA*mA |
| | SEQ ID NO: 2149 | mU*fU*mGmAfGmUfUmUmCmCmAmUmCfAmGfAmGmUmUmUmC*mC*mA |
| D: 991 | SEQ ID NO: 1596 | mA*mA*mAmCmUmCmUmGfAfUfGmGmAmAmAmCmUmCmA*mU*mA |
| | SEQ ID NO: 2150 | mU*fA*mUmGfAmGfUmUmUmCmCmAmUfCmAfGmAmGmUmUmU*mC*mC |
| D: 992 | SEQ ID NO: 1598 | mG*mA*mUmGmGmAmAmAfCfUfCmAmUmGmAmGmCmGmU*mG*mA |
| | SEQ ID NO: 2151 | mU*fC*mAmCfGmCfUmCmAmUmGmAmGfUmUfUmCmCmAmUmC*mA*mG |
| D: 993 | SEQ ID NO: 1600 | mA*mU*mGmGmAmAmAmCfUfCfAmUmGmAmGmCmGmUmG*mG*mA |
| | SEQ ID NO: 2152 | mU*fC*mCmAfCmGfCmUmCmAmUmGmAfGmUfUmUmCmCmAmU*mC*mA |
| D: 994 | SEQ ID NO: 1602 | mU*mG*mGmAmAmAmCmUfCfAfUmGmAmGmCmGmUmGmG*mU*mA |
| | SEQ ID NO: 2153 | mU*fA*mCmCfAmCfGmCmUmCmAmUmGfAmGfUmUmUmCmCmA*mU*mC |
| D: 995 | SEQ ID NO: 1604 | mG*mG*mAmAmAmCmUmCfAfUfGmAmGmCmGmUmGmGmU*mG*mA |
| | SEQ ID NO: 2154 | mU*fC*mAmCfCmAfCmGmCmUmCmAmUfGmAfGmUmUmUmCmC*mA*mU |
| D: 996 | SEQ ID NO: 1606 | mG*mA*mAmAmCmUmCmAfUfGfAmGmCmGmUmGmGmUmG*mU*mA |
| | SEQ ID NO: 2155 | mU*fA*mCmAfCmCfAmCmGmCmUmCmAfUmGfAmGmUmUmUmC*mC*mA |
| D: 997 | SEQ ID NO: 1608 | mA*mG*mCmGmUmGmGmUfGfUfAmUmCmUmAmUmUmCmG*mC*mA |
| | SEQ ID NO: 2156 | mU*fG*mCmGfAmAfUmAmGmAmUmAmCfAmCfCmAmCmGmCmU*mC*mA |
| D: 998 | SEQ ID NO: 1610 | mU*mA*mCmCmUmUmAmCfAfGfGmGmAmUmUmAmUmAmA*mU*mA |
| | SEQ ID NO: 2157 | mU*fA*mUmUfAmUfAmAmUmCmCmCmUfGmUfAmAmGmGmUmA*mG*mG |
| D: 999 | SEQ ID NO: 1612 | mA*mC*mCmUmUmAmCmAfGfGfGmAmUmUmAmUmAmAmU*mU*mA |
| | SEQ ID NO: 2158 | mU*fA*mAmUfUmAfUmAmAmUmCmCmCfUmGfUmAmAmGmGmU*mA*mG |
| D: 1000 | SEQ ID NO: 1614 | mG*mG*mGmAmUmUmAmUfAfAfUmUmAmCmUmCmCmUmU*mG*mA |
| | SEQ ID NO: 2159 | mU*fC*mAmAfGmGfAmGmUmAmAmUmUfAmUfAmAmUmCmCmC*mU*mG |
| D: 1001 | SEQ ID NO: 1616 | mG*mG*mAmUmUmAmUmAfAfUfUmAmCmUmCmCmUmUmG*mG*mA |
| | SEQ ID NO: 2160 | mU*fC*mCmAfAmGfGmAmGmUmAmAmUfUmAfUmAmAmUmCmC*mC*mU |
| D: 1002 | SEQ ID NO: 1618 | mG*mA*mUmUmAmUmAmAfUfUfAmCmUmCmCmUmUmGmG*mU*mA |
| | SEQ ID NO: 2161 | mU*fA*mCmCfAmAfGmGmAmGmUmAmAfUmUfAmUmAmAmUmC*mC*mC |
| D: 1003 | SEQ ID NO: 1620 | mA*mU*mUmAmUmAmAmUfUfAfCmUmCmCmUmUmGmGmU*mG*mA |
| | SEQ ID NO: 2162 | mU*fC*mAmCfCmAfAmGmGmAmGmUmAfAmUfUmAmUmAmAmU*mC*mC |
| D: 1004 | SEQ ID NO: 1622 | mA*mA*mUmUmAmCmUmCfCfUfUmGmGmUmGmAmUmGmG*mG*mA |
| | SEQ ID NO: 2163 | mU*fC*mCmCfAmUfCmAmCmCmAmAmGfGmAfGmUmAmAmUmU*mA*mU |
| D: 1005 | SEQ ID NO: 1624 | mA*mU*mUmAmCmUmCmCfUfUfGmGmUmGmAmUmGmGmG*mA*mA |
| | SEQ ID NO: 2164 | mU*fU*mCmCfCmAfUmCmAmCmCmAmAfGmGfAmGmUmAmAmU*mU*mA |
| D: 1006 | SEQ ID NO: 1626 | mC*mC*mUmUmGmGmUmGfAfUfGmGmGmAmGmCmUmUmG*mU*mA |
| | SEQ ID NO: 2165 | mU*fA*mCmAfAmGfCmUmCmCmCmAmUfCmAfCmCmAmAmGmG*mA*mG |
| D: 1007 | SEQ ID NO: 1628 | mU*mG*mGmUmGmAmUmGfGfGfAmGmCmUmUmGmUmUmG*mU*mA |
| | SEQ ID NO: 2166 | mU*fA*mCmAfAmCfAmAmGmCmUmCmCfCmAfUmCmAmCmCmA*mA*mG |
| D: 1008 | SEQ ID NO: 1630 | mU*mA*mUmUmGmGmAmUfAfUfAmUmGmCmCmCmAmUmC*mC*mA |
| | SEQ ID NO: 2167 | mU*fG*mGmAfUmGfGmGmCmAmUmAmUfAmUfCmCmAmAmUmA*mA*mC |
| D: 1009 | SEQ ID NO: 1632 | mA*mU*mUmGmGmAmUmAfUfAfUmGmCmCmCmAmUmCmC*mC*mA |
| | SEQ ID NO: 2168 | mU*fG*mGmGfAmUfGmGmGmCmAmUmAfUmAfUmCmCmAmAmU*mA*mA |
| D: 1010 | SEQ ID NO: 1634 | mC*mA*mGmAmAmGmGmUfUfGfUmCmUmUmGmUmGmGmC*mC*mA |
| | SEQ ID NO: 2169 | mU*fG*mGmCfCmAfCmAmAmGmAmCmAfAmCfCmUmUmCmUmG*mU*mU |
| D: 1011 | SEQ ID NO: 1636 | mA*mG*mGmUmUmGmUmCfUfUfGmUmGmGmCmCmAmGmC*mA*mA |
| | SEQ ID NO: 2170 | mU*fU*mGmCfUmGfGmCmCmAmCmAmAfGmAfCmAmAmCmCmU*mU*mC |
| D: 1012 | SEQ ID NO: 1638 | mU*mU*mGmUmCmUmUmGfUfGfGmCmCmAmGmCmAmCmC*mA*mA |
| | SEQ ID NO: 2171 | mU*fU*mGmGfUmGfCmUmGmGmCmCmAfCmAfAmGmAmCmAmA*mC*mC |
| D: 1013 | SEQ ID NO: 1640 | mU*mG*mUmCmUmUmGmUfGfGfCmCmAmGmCmAmCmCmA*mA*mA |
| | SEQ ID NO: 2172 | mU*fU*mUmGfGmUfGmCmUmGmGmCmCfAmCfAmAmGmAmCmA*mA*mC |
| D: 1014 | SEQ ID NO: 1642 | mA*mG*mGmUmCmUmUmGfGfUfGmGmAmGmGmUmGmCmC*mA*mA |
| | SEQ ID NO: 2173 | mU*fU*mGmGfCmAfCmCmUmCmCmAmCfCmAfAmGmAmCmCmU*mA*mU |
| D: 1015 | SEQ ID NO: 1644 | mG*mG*mUmCmUmUmGmGfUfGfGmAmGmGmUmGmCmCmA*mG*mA |
| | SEQ ID NO: 2174 | mU*fC*mUmGfGmCfAmCmCmUmCmCmAfCmCfAmAmGmAmCmC*mU*mA |
| D: 1016 | SEQ ID NO: 1646 | mG*mU*mGmGmAmGmGmUfGfCfCmAmGmCmAmGmCmCmG*mA*mA |
| | SEQ ID NO: 2175 | mU*fU*mCmGfGmCfUmGmCmUmGmGmCfAmCfCmUmCmCmAmC*mC*mA |
| D: 1017 | SEQ ID NO: 1648 | mG*mU*mGmCmCmAmGmCfAfGfCmCmGmAmGmUmCmCmU*mU*mA |
| | SEQ ID NO: 2176 | mU*fA*mAmGfGmAfCmUmCmGmGmCmUfGmCfUmGmGmCmAmC*mC*mU |
| D: 1018 | SEQ ID NO: 1650 | mC*mA*mGmCmAmGmCmCfGfAfGmUmCmCmUmUmGmCmA*mG*mA |
| | SEQ ID NO: 2177 | mU*fC*mUmGfCmAfAmGmGmAmCmUmCfGmGfCmUmGmCmUmG*mG*mC |
| D: 1019 | SEQ ID NO: 1652 | mA*mG*mCmAmGmCmCmGfAfGfUmCmCmUmUmGmCmAmG*mA*mA |
| | SEQ ID NO: 2178 | mU*fU*mCmUfGmCfAmAmGmGmAmCmUfCmGfGmCmUmGmCmU*mG*mG |
| D: 1020 | SEQ ID NO: 1654 | mG*mC*mAmGmCmCmGmAfGfUfCmCmUmUmGmCmAmGmA*mU*mA |
| | SEQ ID NO: 2179 | mU*fA*mUmCfUmGfCmAmAmGmGmAmCfUmCfGmGmCmUmGmC*mU*mG |
| D: 1021 | SEQ ID NO: 1656 | mC*mA*mGmCmCmGmAmGfUfCfCmUmUmGmCmAmGmAmU*mG*mA |
| | SEQ ID NO: 2180 | mU*fC*mAmUfCmUfGmCmAmAmGmGmAfCmUfCmGmGmCmUmG*mC*mU |
| D: 1022 | SEQ ID NO: 1658 | mG*mC*mCmGmAmGmUmCfCfUfUmGmCmAmGmAmUmGmG*mG*mA |
| | SEQ ID NO: 2181 | mU*fC*mCmCfAmUfCmUmGmCmAmAmGfGmAfCmUmCmGmGmC*mU*mG |
| D: 1023 | SEQ ID NO: 1660 | mC*mG*mAmGmUmCmCmUfUfGfCmAmGmAmUmGmGmGmA*mU*mA |
| | SEQ ID NO: 2182 | mU*fA*mUmCfCmCfAmUmCmUmGmCmAfAmGfGmAmCmUmCmG*mG*mC |
| D: 1024 | SEQ ID NO: 1662 | mU*mU*mGmCmAmGmAmUfGfGfGmAmUmGmAmCmUmCmG*mU*mA |
| | SEQ ID NO: 2183 | mU*fA*mCmGfAmGfUmCmAmUmCmCmCfAmUfCmUmGmCmAmA*mG*mG |
| D: 1025 | SEQ ID NO: 1664 | mU*mG*mCmAmGmAmUmGfGfGfAmUmGmAmCmUmCmGmU*mG*mA |
| | SEQ ID NO: 2184 | mU*fC*mAmCfGmAfGmUmCmAmUmCmCfCmAfUmCmUmGmCmA*mA*mG |
| D: 1026 | SEQ ID NO: 1666 | mG*mC*mAmGmAmUmGmGfGfAfUmGmAmCmUmCmGmUmG*mG*mA |
| | SEQ ID NO: 2185 | mU*fC*mCmAfCmGfAmGmUmCmAmUmCfCmCfAmUmCmUmGmC*mA*mA |
| D: 1027 | SEQ ID NO: 1668 | mC*mA*mGmAmUmGmGmGfAfUfGmAmCmUmCmGmUmGmG*mC*mA |
| | SEQ ID NO: 2186 | mU*fG*mCmCfAmCfGmAmGmUmCmAmUfCmCfCmAmUmCmUmG*mC*mA |
| D: 1028 | SEQ ID NO: 1670 | mA*mG*mAmUmGmGmGmAfUfGfAmCmUmCmGmUmGmGmC*mC*mA |
| | SEQ ID NO: 2187 | mU*fG*mGmCfCmAfCmGmAmGmUmCmAfUmCfCmCmAmUmCmU*mG*mC |
| D: 1029 | SEQ ID NO: 1672 | mG*mA*mUmGmGmGmAmUfGfAfCmUmCmGmUmGmGmCmC*mC*mA |
| | SEQ ID NO: 2188 | mU*fG*mGmGfCmCfAmCmGmAmGmUmCfAmUfCmCmCmAmUmC*mU*mG |
| D: 1030 | SEQ ID NO: 1674 | mA*mU*mGmGmGmAmUmGfAfCfUmCmGmUmGmGmCmCmC*mA*mA |
| | SEQ ID NO: 2189 | mU*fU*mGmGfGmCfCmAmCmGmAmGmUfCmAfUmCmCmCmAmU*mC*mU |
| D: 1031 | SEQ ID NO: 1676 | mU*mG*mGmGmAmUmGmAfCfUfCmGmUmGmGmCmCmCmA*mG*mA |
| | SEQ ID NO: 2190 | mU*fC*mUmGfGmGfCmCmAmCmGmAmGfUmCfAmUmCmCmCmA*mU*mC |
| D: 1032 | SEQ ID NO: 1678 | mG*mG*mGmAmUmGmAmCfUfCfGmUmGmGmCmCmCmAmG*mU*mA |
| | SEQ ID NO: 2191 | mU*fA*mCmUfGmGfGmCmCmAmCmGmAfGmUfCmAmUmCmCmC*mA*mU |
| D: 1033 | SEQ ID NO: 1680 | mG*mU*mGmGmCmCmCmAfGfUfUmGmUmGmCmGmUmCmU*mU*mA |
| | SEQ ID NO: 2192 | mU*fA*mAmGfAmCfGmCmAmCmAmAmCfUmGfGmGmCmCmAmC*mG*mA |
| D: 1034 | SEQ ID NO: 1682 | mU*mG*mGmCmCmCmAmGfUfUfGmUmGmCmGmUmCmUmU*mC*mA |
| | SEQ ID NO: 2193 | mU*fG*mAmAfGmAfCmGmCmAmCmAmAfCmUfGmGmGmCmCmA*mC*mG |
| D: 1035 | SEQ ID NO: 1684 | mG*mC*mCmCmAmGmUmUfGfUfGmCmGmUmCmUmUmCmC*mA*mA |
| | SEQ ID NO: 2194 | mU*fU*mGmGfAmAfGmAmCmGmCmAmCfAmAfCmUmGmGmGmC*mC*mA |
| D: 1036 | SEQ ID NO: 1686 | mC*mC*mCmAmGmUmUmGfUfGfCmGmUmCmUmUmCmCmA*mC*mA |
| | SEQ ID NO: 2195 | mU*fG*mUmGfGmAfAmGmAmCmGmCmAfCmAfAmCmUmGmGmG*mC*mC |
| D: 1037 | SEQ ID NO: 1688 | mC*mC*mAmGmUmUmGmUfGfCfGmUmCmUmUmCmCmAmC*mG*mA |
| | SEQ ID NO: 2196 | mU*fC*mGmUfGmGfAmAmGmAmCmGmCfAmCfAmAmCmUmGmG*mG*mC |
| D: 1038 | SEQ ID NO: 1690 | mC*mA*mGmUmUmGmUmGfCfGfUmCmUmUmCmCmAmCmG*mU*mA |
| | SEQ ID NO: 2197 | mU*fA*mCmGfUmGfGmAmAmGmAmCmGfCmAfCmAmAmCmUmG*mG*mG |
| D: 1039 | SEQ ID NO: 1692 | mA*mG*mUmUmGmUmGmCfGfUfCmUmUmCmCmAmCmGmU*mG*mA |
| | SEQ ID NO: 2198 | mU*fC*mAmCfGmUfGmGmAmAmGmAmCfGmCfAmCmAmAmCmU*mG*mG |
| D: 1040 | SEQ ID NO: 1694 | mU*mU*mGmUmGmAmCmUfCfUfGmCmAmGmAmAmGmUmG*mA*mA |
| | SEQ ID NO: 2199 | mU*fU*mCmAfCmUfUmCmUmGmCmAmGfAmGfUmCmAmCmAmA*mG*mC |
| D: 1041 | SEQ ID NO: 1696 | mC*mU*mGmAmAmGmGmGfUfUfCmGmCmAmGmUmGmAmU*mA*mA |
| | SEQ ID NO: 2200 | mU*fU*mAmUfCmAfCmUmGmCmGmAmAfCmCfCmUmUmCmAmG*mA*mU |
| D: 1042 | SEQ ID NO: 1698 | mU*mG*mAmAmGmGmGmUfUfCfGmCmAmGmUmGmAmUmA*mA*mA |
| | SEQ ID NO: 2201 | mU*fU*mUmAfUmCfAmCmUmGmCmGmAfAmCfCmCmUmUmCmA*mG*mA |
| D: 1043 | SEQ ID NO: 1700 | mG*mA*mAmGmGmGmUmUfCfGfCmAmGmUmGmAmUmAmA*mA*mA |
| | SEQ ID NO: 2202 | mU*fU*mUmUfAmUfCmAmCmUmGmCmGfAmAfCmCmCmUmUmC*mA*mG |
| D: 1044 | SEQ ID NO: 1702 | mA*mG*mGmGmUmUmCmGfCfAfGmUmGmAmUmAmAmAmG*mG*mA |
| | SEQ ID NO: 2203 | mU*fC*mCmUfUmUfAmUmCmAmCmUmGfCmGfAmAmCmCmCmU*mU*mC |
| D: 1045 | SEQ ID NO: 1704 | mG*mG*mGmUmUmCmGmCfAfGfUmGmAmUmAmAmAmGmG*mA*mA |
| | SEQ ID NO: 2204 | mU*fU*mCmCfUmUfUmAmUmCmAmCmUfGmCfGmAmAmCmCmC*mU*mU |
| D: 1046 | SEQ ID NO: 1706 | mU*mU*mCmGmCmAmGmUfGfAfUmAmAmAmGmGmAmGmG*mC*mA |
| | SEQ ID NO: 2205 | mU*fG*mCmCfUmCfCmUmUmUmAmUmCfAmCfUmGmCmGmAmA*mC*mC |
| D: 1047 | SEQ ID NO: 1708 | mC*mA*mGmUmGmAmUmAfAfAfGmGmAmGmGmCmAmUmU*mU*mA |
| | SEQ ID NO: 2206 | mU*fA*mAmAfUmGfCmCmUmCmCmUmUfUmAfUmCmAmCmUmG*mC*mG |
| D: 1048 | SEQ ID NO: 1710 | mC*mU*mAmGmCmAmGmAfUfUfUmGmCmAmCmGmUmCmU*mA*mA |
| | SEQ ID NO: 2207 | mU*fU*mAmGfAmCfGmUmGmCmAmAmAfUmCfUmGmCmUmAmG*mU*mG |
| D: 1049 | SEQ ID NO: 1712 | mU*mA*mGmCmAmGmAmUfUfUfGmCmAmCmGmUmCmUmA*mC*mA |
| | SEQ ID NO: 2208 | mU*fG*mUmAfGmAfCmGmUmGmCmAmAfAmUfCmUmGmCmUmA*mG*mU |
| D: 1050 | SEQ ID NO: 1714 | mA*mG*mCmAmGmAmUmUfUfGfCmAmCmGmUmCmUmAmC*mA*mA |
| | SEQ ID NO: 2209 | mU*fU*mGmUfAmGfAmCmGmUmGmCmAfAmAfUmCmUmGmCmU*mA*mG |
| D: 1051 | SEQ ID NO: 1716 | mG*mC*mAmGmAmUmUmUfGfCfAmCmGmUmCmUmAmCmA*mG*mA |
| | SEQ ID NO: 2210 | mU*fC*mUmGfUmAfGmAmCmGmUmGmCfAmAfAmUmCmUmGmC*mU*mA |
| D: 1052 | SEQ ID NO: 1718 | mC*mA*mGmAmUmUmUmGfCfAfCmGmUmCmUmAmCmAmG*mA*mA |
| | SEQ ID NO: 2211 | mU*fU*mCmUfGmUfAmGmAmCmGmUmGfCmAfAmAmUmCmUmG*mC*mU |
| D: 1053 | SEQ ID NO: 1720 | mG*mA*mUmUmUmGmCmAfCfGfUmCmUmAmCmAmGmAmA*mA*mA |
| | SEQ ID NO: 2212 | mU*fU*mUmUfCmUfGmUmAmGmAmCmGfUmGfCmAmAmAmUmC*mU*mG |
| D: 1054 | SEQ ID NO: 1722 | mA*mU*mUmUmGmCmAmCfGfUfCmUmAmCmAmGmAmAmA*mC*mA |
| | SEQ ID NO: 2213 | mU*fG*mUmUfUmCfUmGmUmAmGmAmCfGmUfGmCmAmAmAmU*mC*mU |
| D: 1055 | SEQ ID NO: 1724 | mC*mU*mGmGmAmCmGmCfAfAfCmCmUmUmUmAmUmAmU*mC*mA |
| | SEQ ID NO: 2214 | mU*fG*mAmUfAmUfAmAmAmGmGmUmUfGmCfGmUmCmCmAmG*mC*mU |
| D: 1056 | SEQ ID NO: 1726 | mU*mG*mGmAmCmGmCmAfAfCfCmUmUmUmAmUmAmUmC*mC*mA |
| | SEQ ID NO: 2215 | mU*fG*mGmAfUmAfUmAmAmAmGmGmUfUmGfCmGmUmCmCmA*mG*mC |
| D: 1057 | SEQ ID NO: 1728 | mG*mG*mAmCmGmCmAmAfCfCfUmUmUmAmUmAmUmCmC*mG*mA |
| | SEQ ID NO: 2216 | mU*fC*mGmGfAmUfAmUmAmAmAmGmGfUmUfGmCmGmUmCmC*mA*mG |
| D: 1058 | SEQ ID NO: 1730 | mG*mA*mCmGmCmAmAmCfCfUfUmUmAmUmAmUmCmCmG*mU*mA |
| | SEQ ID NO: 2217 | mU*fA*mCmGfGmAfUmAmUmAmAmAmGfGmUfUmGmCmGmUmC*mC*mA |
| D: 1059 | SEQ ID NO: 1732 | mC*mG*mCmAmAmCmCmUfUfUfAmUmAmUmCmCmGmUmU*mU*mA |
| | SEQ ID NO: 2218 | mU*fA*mAmAfCmGfGmAmUmAmUmAmAfAmGfGmUmUmGmCmG*mU*mC |
| D: 1060 | SEQ ID NO: 1734 | mG*mC*mAmAmCmCmUmUfUfAfUmAmUmCmCmGmUmUmU*mC*mA |
| | SEQ ID NO: 2219 | mU*fG*mAmAfAmCfGmGmAmUmAmUmAfAmAfGmGmUmUmGmC*mG*mU |
| D: 1061 | SEQ ID NO: 1736 | mC*mA*mAmCmCmUmUmUfAfUfAmUmCmCmGmUmUmUmC*mC*mA |
| | SEQ ID NO: 2220 | mU*fG*mGmAfAmAfCmGmGmAmUmAmUfAmAfAmGmGmUmUmG*mC*mG |
| D: 1062 | SEQ ID NO: 1738 | mC*mC*mUmUmUmAmUmAfUfCfCmGmUmUmUmCmCmAmG*mU*mA |
| | SEQ ID NO: 2221 | mU*fA*mCmUfGmGfAmAmAmCmGmGmAfUmAfUmAmAmAmGmG*mU*mU |
| D: 1063 | SEQ ID NO: 1740 | mC*mU*mUmUmAmUmAmUfCfCfGmUmUmUmCmCmAmGmU*mC*mA |
| | SEQ ID NO: 2222 | mU*fG*mAmCfUmGfGmAmAmAmCmGmGfAmUfAmUmAmAmAmG*mG*mU |
| D: 1064 | SEQ ID NO: 1742 | mU*mA*mUmCmCmGmUmUfUfCfCmAmGmUmCmCmAmGmG*mU*mA |
| | SEQ ID NO: 2223 | mU*fA*mCmCfUmGfGmAmCmUmGmGmAfAmAfCmGmGmAmUmA*mU*mA |
| D: 1065 | SEQ ID NO: 1744 | mU*mU*mGmUmUmUmGmUfGfAfAmGmCmUmGmUmCmAmU*mU*mA |
| | SEQ ID NO: 2224 | mU*fA*mAmUfGmAfCmAmGmCmUmUmCfAmCfAmAmAmCmAmA*mC*mA |
| D: 1066 | SEQ ID NO: 1746 | mU*mU*mUmGmUmGmAmAfGfCfUmGmUmCmAmUmUmCmC*mA*mA |
| | SEQ ID NO: 2225 | mU*fU*mGmGfAmAfUmGmAmCmAmGmCfUmUfCmAmCmAmAmA*mC*mA |
| D: 1067 | SEQ ID NO: 1748 | mU*mU*mGmUmGmAmAmGfCfUfGmUmCmAmUmUmCmCmA*mG*mA |
| | SEQ ID NO: 2226 | mU*fC*mUmGfGmAfAmUmGmAmCmAmGfCmUfUmCmAmCmAmA*mA*mC |
| D: 1068 | SEQ ID NO: 1750 | mG*mA*mAmGmCmUmGmUfCfAfUmUmCmCmAmGmCmCmA*mA*mA |
| | SEQ ID NO: 2227 | mU*fU*mUmGfGmCfUmGmGmAmAmUmGfAmCfAmGmCmUmUmC*mA*mC |
| D: 1069 | SEQ ID NO: 1752 | mG*mC*mUmGmUmCmAmUfUfCfCmAmGmCmCmAmAmGmG*mU*mA |
| | SEQ ID NO: 2228 | mU*fA*mCmCfUmUfGmGmCmUmGmGmAfAmUfGmAmCmAmGmC*mU*mU |
| D: 1070 | SEQ ID NO: 1754 | mC*mU*mGmUmCmAmUmUfCfCfAmGmCmCmAmAmGmGmU*mU*mA |
| | SEQ ID NO: 2229 | mU*fA*mAmCfCmUfUmGmGmCmUmGmGfAmAfUmGmAmCmAmG*mC*mU |
| D: 1071 | SEQ ID NO: 1756 | mU*mG*mUmCmAmUmUmCfCfAfGmCmCmAmAmGmGmUmU*mG*mA |
| | SEQ ID NO: 2230 | mU*fC*mAmAfCmCfUmUmGmGmCmUmGfGmAfAmUmGmAmCmA*mG*mC |
| D: 1072 | SEQ ID NO: 1758 | mG*mU*mCmAmUmUmCmCfAfGfCmCmAmAmGmGmUmUmG*mU*mA |
| | SEQ ID NO: 2231 | mU*fA*mCmAfAmCfCmUmUmGmGmCmUfGmGfAmAmUmGmAmC*mA*mG |
| D: 1073 | SEQ ID NO: 1760 | mG*mC*mUmGmGmGmAmGfCfAfUmAmGmGmAmGmGmCmU*mA*mA |
| | SEQ ID NO: 2232 | mU*fU*mAmGfCmCfUmCmCmUmAmUmGfCmUfCmCmCmAmGmC*mC*mA |
| D: 1074 | SEQ ID NO: 1762 | mC*mU*mGmGmGmAmGmCfAfUfAmGmGmAmGmGmCmUmA*mC*mA |
| | SEQ ID NO: 2233 | mU*fG*mUmAfGmCfCmUmCmCmUmAmUfGmCfUmCmCmCmAmG*mC*mC |
| D: 1075 | SEQ ID NO: 1764 | mG*mG*mGmAmGmCmAmUfAfGfGmAmGmGmCmUmAmCmA*mA*mA |
| | SEQ ID NO: 2234 | mU*fU*mUmGfUmAfGmCmCmUmCmCmUfAmUfGmCmUmCmCmC*mA*mG |
| D: 1076 | SEQ ID NO: 1766 | mG*mG*mAmGmCmAmUmAfGfGfAmGmGmCmUmAmCmAmA*mC*mA |
| | SEQ ID NO: 2235 | mU*fG*mUmUfGmUfAmGmCmCmUmCmCfUmAfUmGmCmUmCmC*mC*mA |
| D: 1077 | SEQ ID NO: 1768 | mA*mG*mCmAmUmAmGmGfAfGfGmCmUmAmCmAmAmCmG*mC*mA |
| | SEQ ID NO: 2236 | mU*fG*mCmGfUmUfGmUmAmGmCmCmUfCmCfUmAmUmGmCmU*mC*mC |
| D: 1078 | SEQ ID NO: 1770 | mG*mC*mAmUmAmGmGmAfGfGfCmUmAmCmAmAmCmGmC*mC*mA |
| | SEQ ID NO: 2237 | mU*fG*mGmCfGmUfUmGmUmAmGmCmCfUmCfCmUmAmUmGmC*mU*mC |
| D: 1079 | SEQ ID NO: 1772 | mC*mA*mUmAmGmGmAmGfGfCfUmAmCmAmAmCmGmCmC*mC*mA |
| | SEQ ID NO: 2238 | mU*fG*mGmGfCmGfUmUmGmUmAmGmCfCmUfCmCmUmAmUmG*mC*mU |
| D: 1080 | SEQ ID NO: 1774 | mA*mU*mAmGmGmAmGmGfCfUfAmCmAmAmCmGmCmCmC*mA*mA |
| | SEQ ID NO: 2239 | mU*fU*mGmGfGmCfGmUmUmGmUmAmGfCmCfUmCmCmUmAmU*mG*mC |
| D: 1081 | SEQ ID NO: 1776 | mG*mA*mGmGmCmUmAmCfAfAfCmGmCmCmCmAmUmGmC*mA*mA |
| | SEQ ID NO: 2240 | mU*fU*mGmCfAmUfGmGmGmCmGmUmUfGmUfAmGmCmCmUmC*mC*mU |
| D: 1082 | SEQ ID NO: 1778 | mG*mG*mCmUmAmCmAmAfCfGfCmCmCmAmUmGmCmAmG*mC*mA |
| | SEQ ID NO: 2241 | mU*fG*mCmUfGmCfAmUmGmGmGmCmGfUmUfGmUmAmGmCmC*mU*mC |
| D: 1083 | SEQ ID NO: 1780 | mG*mC*mUmAmCmAmAmCfGfCfCmCmAmUmGmCmAmGmC*mA*mA |
| | SEQ ID NO: 2242 | mU*fU*mGmCfUmGfCmAmUmGmGmGmCfGmUfUmGmUmAmGmC*mC*mU |
| D: 1084 | SEQ ID NO: 1782 | mC*mU*mAmCmAmAmCmGfCfCfCmAmUmGmCmAmGmCmA*mA*mA |
| | SEQ ID NO: 2243 | mU*fU*mUmGfCmUfGmCmAmUmGmGmGfCmGfUmUmGmUmAmG*mC*mC |
| D: 1085 | SEQ ID NO: 1784 | mA*mC*mAmAmCmGmCmCfCfAfUmGmCmAmGmCmAmAmA*mC*mA |
| | SEQ ID NO: 2244 | mU*fG*mUmUfUmGfCmUmGmCmAmUmGfGmGfCmGmUmUmGmU*mA*mG |
| D: 1086 | SEQ ID NO: 1786 | mC*mA*mAmCmGmCmCmCfAfUfGmCmAmGmCmAmAmAmC*mA*mA |
| | SEQ ID NO: 2245 | mU*fU*mGmUfUmUfGmCmUmGmCmAmUfGmGfGmCmGmUmUmG*mU*mA |
| D: 1087 | SEQ ID NO: 1788 | mA*mA*mCmGmCmCmCmAfUfGfCmAmGmCmAmAmAmCmA*mU*mA |
| | SEQ ID NO: 2246 | mU*fA*mUmGfUmUfUmGmCmUmGmCmAfUmGfGmGmCmGmUmU*mG*mU |
| D: 1088 | SEQ ID NO: 1790 | mC*mC*mCmAmUmGmCmAfGfCfAmAmAmCmAmUmUmGmU*mC*mA |
| | SEQ ID NO: 2247 | mU*fG*mAmCfAmAfUmGmUmUmUmGmCfUmGfCmAmUmGmGmG*mC*mG |
| D: 1089 | SEQ ID NO: 1792 | mC*mU*mGmUmGmGmAmCfAfGfGmAmUmGmCmAmGmCmA*mC*mA |
| | SEQ ID NO: 2248 | mU*fG*mUmGfCmUfGmCmAmUmCmCmUfGmUfCmCmAmCmAmG*mG*mC |
| D: 1090 | SEQ ID NO: 1794 | mG*mG*mAmUmGmCmAmGfCfAfCmAmGmAmAmUmGmUmU*mG*mA |
| | SEQ ID NO: 2249 | mU*fC*mAmAfCmAfUmUmCmUmGmUmGfCmUfGmCmAmUmCmC*mU*mG |
| D: 1091 | SEQ ID NO: 1796 | mU*mU*mGmGmUmAmGmUfUfCfAmAmAmCmUmGmUmAmU*mU*mA |
| | SEQ ID NO: 2250 | mU*fA*mAmUfAmCfAmGmUmUmUmGmAfAmCfUmAmCmCmAmA*mC*mA |
| D: 1092 | SEQ ID NO: 1798 | mU*mG*mGmUmAmGmUmUfCfAfAmAmCmUmGmUmAmUmU*mA*mA |
| | SEQ ID NO: 2251 | mU*fU*mAmAfUmAfCmAmGmUmUmUmGfAmAfCmUmAmCmCmA*mA*mC |
| D: 1093 | SEQ ID NO: 1800 | mG*mG*mUmAmGmUmUmCfAfAfAmCmUmGmUmAmUmUmA*mC*mA |
| | SEQ ID NO: 2252 | mU*fG*mUmAfAmUfAmCmAmGmUmUmUfGmAfAmCmUmAmCmC*mA*mA |
| D: 1094 | SEQ ID NO: 1802 | mG*mU*mAmUmUmAmCmUfUfUfAmAmUmGmGmAmAmGmC*mA*mA |
| | SEQ ID NO: 2253 | mU*fU*mGmCfUmUfCmCmAmUmUmAmAfAmGfUmAmAmUmAmC*mA*mG |
| D: 1095 | SEQ ID NO: 1804 | mU*mA*mUmUmAmCmUmUfUfAfAmUmGmGmAmAmGmCmA*mA*mA |
| | SEQ ID NO: 2254 | mU*fU*mUmGfCmUfUmCmCmAmUmUmAfAmAfGmUmAmAmUmA*mC*mA |
| D: 1096 | SEQ ID NO: 1806 | mU*mU*mAmCmUmUmUmAfAfUfGmGmAmAmGmCmAmAmG*mU*mA |
| | SEQ ID NO: 2255 | mU*fA*mCmUfUmGfCmUmUmCmCmAmUfUmAfAmAmGmUmAmA*mU*mA |
| D: 1097 | SEQ ID NO: 1808 | mU*mA*mCmUmUmUmAmAfUfGfGmAmAmGmCmAmAmGmU*mG*mA |
| | SEQ ID NO: 2256 | mU*fC*mAmCfUmUfGmCmUmUmCmCmAfUmUfAmAmAmGmUmA*mA*mU |
| D: 1098 | SEQ ID NO: 1810 | mG*mU*mCmCmCmAmCmAfAfAfUmGmAmAmGmAmUmUmU*mA*mA |
| | SEQ ID NO: 2257 | mU*fU*mAmAfAmUfCmUmUmCmAmUmUfUmGfUmGmGmGmAmC*mC*mA |
| D: 1099 | SEQ ID NO: 1812 | mA*mA*mGmAmUmUmUmAfUfAfUmAmUmCmAmGmCmUmG*mC*mA |
| | SEQ ID NO: 2258 | mU*fG*mCmAfGmCfUmGmAmUmAmUmAfUmAfAmAmUmCmUmU*mC*mA |
| D: 1100 | SEQ ID NO: 1814 | mU*mC*mAmGmCmUmGmCfAfCfCmAmUmGmCmCmAmUmC*mU*mA |
| | SEQ ID NO: 2259 | mU*fA*mGmAfUmGfGmCmAmUmGmGmUfGmCfAmGmCmUmGmA*mU*mA |
| D: 1101 | SEQ ID NO: 1816 | mC*mA*mGmCmUmGmCmAfCfCfAmUmGmCmCmAmUmCmU*mA*mA |
| | SEQ ID NO: 2260 | mU*fU*mAmGfAmUfGmGmCmAmUmGmGfUmGfCmAmGmCmUmG*mA*mU |
| D: 1102 | SEQ ID NO: 1818 | mA*mG*mCmUmGmCmAmCfCfAfUmGmCmCmAmUmCmUmA*mU*mA |
| | SEQ ID NO: 2261 | mU*fA*mUmAfGmAfUmGmGmCmAmUmGfGmUfGmCmAmGmCmU*mG*mA |
| D: 1103 | SEQ ID NO: 1820 | mG*mC*mUmGmCmAmCmCfAfUfGmCmCmAmUmCmUmAmU*mA*mA |
| | SEQ ID NO: 2262 | mU*fU*mAmUfAmGfAmUmGmGmCmAmUfGmGfUmGmCmAmGmC*mU*mG |
| D: 1104 | SEQ ID NO: 1822 | mC*mU*mGmCmAmCmCmAfUfGfCmCmAmUmCmUmAmUmA*mG*mA |
| | SEQ ID NO: 2263 | mU*fC*mUmAfUmAfGmAmUmGmGmCmAfUmGfGmUmGmCmAmG*mC*mU |
| D: 1105 | SEQ ID NO: 1824 | mU*mG*mCmAmCmCmAmUfGfCfCmAmUmCmUmAmUmAmG*mA*mA |
| | SEQ ID NO: 2264 | mU*fU*mCmUfAmUfAmGmAmUmGmGmCfAmUfGmGmUmGmCmA*mG*mC |
| D: 1106 | SEQ ID NO: 1826 | mG*mC*mAmCmCmAmUmGfCfCfAmUmCmUmAmUmAmGmA*mG*mA |
| | SEQ ID NO: 2265 | mU*fC*mUmCfUmAfUmAmGmAmUmGmGfCmAfUmGmGmUmGmC*mA*mG |
| D: 1107 | SEQ ID NO: 1828 | mC*mA*mCmCmAmUmGmCfCfAfUmCmUmAmUmAmGmAmG*mA*mA |
| | SEQ ID NO: 2266 | mU*fU*mCmUfCmUfAmUmAmGmAmUmGfGmCfAmUmGmGmUmG*mC*mA |
| D: 1108 | SEQ ID NO: 1830 | mA*mU*mGmCmCmAmUmCfUfAfUmAmGmAmGmAmUmAmG*mG*mA |
| | SEQ ID NO: 2267 | mU*fC*mCmUfAmUfCmUmCmUmAmUmAfGmAfUmGmGmCmAmU*mG*mG |
| D: 1109 | SEQ ID NO: 1832 | mC*mU*mAmUmAmGmAmGfAfUfAmGmGmAmAmCmGmGmU*mG*mA |
| | SEQ ID NO: 2268 | mU*fC*mAmCfCmGfUmUmCmCmUmAmUfCmUfCmUmAmUmAmG*mA*mU |
| D: 1110 | SEQ ID NO: 1834 | mU*mA*mUmAmGmAmGmAfUfAfGmGmAmAmCmGmGmUmG*mG*mA |
| | SEQ ID NO: 2269 | mU*fC*mCmAfCmCfGmUmUmCmCmUmAfUmCfUmCmUmAmUmA*mG*mA |
| D: 1111 | SEQ ID NO: 1836 | mA*mU*mAmGmAmGmAmUfAfGfGmAmAmCmGmGmUmGmG*mG*mA |
| | SEQ ID NO: 2270 | mU*fC*mCmCfAmCfCmGmUmUmCmCmUfAmUfCmUmCmUmAmU*mA*mG |
| D: 1112 | SEQ ID NO: 1838 | mU*mA*mCmUmAmCmCmUfCfAfGmCmAmAmGmCmCmUmG*mU*mA |
| | SEQ ID NO: 2271 | mU*fA*mCmAfGmGfCmUmUmGmCmUmGfAmGfGmUmAmGmUmA*mG*mG |
| D: 1113 | SEQ ID NO: 1840 | mG*mU*mUmUmGmCmAmGfAfUfGmCmUmAmGmGmUmGmU*mU*mA |
| | SEQ ID NO: 2272 | mU*fA*mAmCfAmCfCmUmAmGmCmAmUfCmUfGmCmAmAmAmC*mA*mG |
| D: 1114 | SEQ ID NO: 1842 | mU*mU*mCmAmAmGmGmAfGfCfAmUmGmCmAmAmAmGmA*mU*mA |
| | SEQ ID NO: 2273 | mU*fA*mUmCfUmUfUmGmCmAmUmGmCfUmCfCmUmUmGmAmA*mC*mA |
| D: 1115 | SEQ ID NO: 1844 | mU*mC*mAmAmGmGmAmGfCfAfUmGmCmAmAmAmGmAmU*mA*mA |
| | SEQ ID NO: 2274 | mU*fU*mAmUfCmUfUmUmGmCmAmUmGfCmUfCmCmUmUmGmA*mA*mC |
| D: 1116 | SEQ ID NO: 1846 | mC*mA*mAmGmGmAmGmCfAfUfGmCmAmAmAmGmAmUmA*mA*mA |
| | SEQ ID NO: 2275 | mU*fU*mUmAfUmCfUmUmUmGmCmAmUfGmCfUmCmCmUmUmG*mA*mA |
| D: 1117 | SEQ ID NO: 1848 | mA*mA*mGmGmAmGmCmAfUfGfCmAmAmAmGmAmUmAmA*mU*mA |
| | SEQ ID NO: 2276 | mU*fA*mUmUfAmUfCmUmUmUmGmCmAfUmGfCmUmCmCmUmU*mG*mA |
| D: 1118 | SEQ ID NO: 1850 | mA*mG*mGmAmGmCmAmUfGfCfAmAmAmGmAmUmAmAmU*mC*mA |
| | SEQ ID NO: 2277 | mU*fG*mAmUfUmAfUmCmUmUmUmGmCfAmUfGmCmUmCmCmU*mU*mG |
| D: 1119 | SEQ ID NO: 1852 | mG*mG*mAmGmCmAmUmGfCfAfAmAmGmAmUmAmAmUmC*mC*mA |
| | SEQ ID NO: 2278 | mU*fG*mGmAfUmUfAmUmCmUmUmUmGfCmAfUmGmCmUmCmC*mU*mU |
| D: 1120 | SEQ ID NO: 1854 | mU*mG*mCmCmCmGmGmCfAfGfCmUmUmGmCmCmCmGmA*mA*mA |
| | SEQ ID NO: 2279 | mU*fU*mUmCfGmGfGmCmAmAmGmCmUfGmCfCmGmGmGmCmA*mU*mU |
| D: 1121 | SEQ ID NO: 1856 | mG*mG*mCmAmGmCmUmUfGfCfCmCmGmAmAmUmUmGmU*mG*mA |
| | SEQ ID NO: 2280 | mU*fC*mAmCfAmAfUmUmCmGmGmGmCfAmAfGmCmUmGmCmC*mG*mG |
| D: 1122 | SEQ ID NO: 1858 | mG*mC*mAmGmCmUmUmGfCfCfCmGmAmAmUmUmGmUmG*mU*mA |
| | SEQ ID NO: 2281 | mU*fA*mCmAfCmAfAmUmUmCmGmGmGfCmAfAmGmCmUmGmC*mC*mG |
| D: 1123 | SEQ ID NO: 1860 | mC*mA*mGmCmUmUmGmCfCfCfGmAmAmUmUmGmUmGmU*mG*mA |
| | SEQ ID NO: 2282 | mU*fC*mAmCfAmCfAmAmUmUmCmGmGfGmCfAmAmGmCmUmG*mC*mC |
| D: 1124 | SEQ ID NO: 1862 | mG*mG*mCmAmGmCmAmUfUfGfGmCmAmGmCmAmGmGmA*mC*mA |
| | SEQ ID NO: 2283 | mU*fG*mUmCfCmUfGmCmUmGmCmCmAfAmUfGmCmUmGmCmC*mA*mU |
| D: 1125 | SEQ ID NO: 1864 | mG*mC*mAmGmCmAmUmUfGfGfCmAmGmCmAmGmGmAmC*mA*mA |
| | SEQ ID NO: 2284 | mU*fU*mGmUfCmCfUmGmCmUmGmCmCfAmAfUmGmCmUmGmC*mC*mA |
| D: 1126 | SEQ ID NO: 1866 | mC*mA*mGmCmAmUmUmGfGfCfAmGmCmAmGmGmAmCmA*mU*mA |
| | SEQ ID NO: 2285 | mU*fA*mUmGfUmCfCmUmGmCmUmGmCfCmAfAmUmGmCmUmG*mC*mC |
| D: 1127 | SEQ ID NO: 1868 | mC*mA*mGmCmAmGmGmAfCfAfUmCmUmUmGmUmCmAmA*mA*mA |
| | SEQ ID NO: 2286 | mU*fU*mUmUfGmAfCmAmAmGmAmUmGfUmCfCmUmGmCmUmG*mC*mC |
| D: 1128 | SEQ ID NO: 1870 | mA*mG*mCmAmGmGmAmCfAfUfCmUmUmGmUmCmAmAmA*mA*mA |
| | SEQ ID NO: 2287 | mU*fU*mUmUfUmGfAmCmAmAmGmAmUfGmUfCmCmUmGmCmU*mG*mC |
| D: 1129 | SEQ ID NO: 1872 | mC*mA*mGmGmAmCmAmUfCfUfUmGmUmCmAmAmAmAmG*mU*mA |
| | SEQ ID NO: 2288 | mU*fA*mCmUfUmUfUmGmAmCmAmAmGfAmUfGmUmCmCmUmG*mC*mU |
| D: 1130 | SEQ ID NO: 1874 | mA*mG*mGmAmCmAmUmCfUfUfGmUmCmAmAmAmAmGmU*mC*mA |
| | SEQ ID NO: 2289 | mU*fG*mAmCfUmUfUmUmGmAmCmAmAfGmAfUmGmUmCmCmU*mG*mC |
| D: 1131 | SEQ ID NO: 1876 | mG*mG*mAmCmAmUmCmUfUfGfUmCmAmAmAmAmGmUmC*mA*mA |
| | SEQ ID NO: 2290 | mU*fU*mGmAfCmUfUmUmUmGmAmCmAfAmGfAmUmGmUmCmC*mU*mG |
| D: 1132 | SEQ ID NO: 1878 | mU*mA*mAmGmUmCmUmGfGfGfAmUmGmUmAmGmAmAmC*mU*mA |
| | SEQ ID NO: 2291 | mU*fA*mGmUfUmCfUmAmCmAmUmCmCfCmAfGmAmCmUmUmA*mA*mU |
| D: 1133 | SEQ ID NO: 1880 | mG*mC*mUmAmUmUmUmGfUfUfCmAmGmAmGmAmGmGmC*mC*mA |
| | SEQ ID NO: 2292 | mU*fG*mGmCfCmUfCmUmCmUmGmAmAfCmAfAmAmUmAmGmC*mC*mU |
| D: 1134 | SEQ ID NO: 1882 | mC*mU*mAmUmUmUmGmUfUfCfAmGmAmGmAmGmGmCmC*mU*mA |
| | SEQ ID NO: 2293 | mU*fA*mGmGfCmCfUmCmUmCmUmGmAfAmCfAmAmAmUmAmG*mC*mC |
| D: 1135 | SEQ ID NO: 1884 | mU*mU*mGmGmAmAmGmUfGfUfUmCmAmAmGmAmAmAmU*mA*mA |
| | SEQ ID NO: 2294 | mU*fU*mAmUfUmUfCmUmUmGmAmAmCfAmCfUmUmCmCmAmA*mU*mA |
| D: 1136 | SEQ ID NO: 1886 | mU*mG*mGmAmAmGmUmGfUfUfCmAmAmGmAmAmAmUmA*mA*mA |
| | SEQ ID NO: 2295 | mU*fU*mUmAfUmUfUmCmUmUmGmAmAfCmAfCmUmUmCmCmA*mA*mU |
| D: 1137 | SEQ ID NO: 1888 | mU*mG*mUmAmCmUmGmAfUfAfAmAmAmUmAmCmUmCmU*mA*mA |
| | SEQ ID NO: 2296 | mU*fU*mAmGfAmGfUmAmUmUmUmUmAfUmCfAmGmUmAmCmA*mC*mA |
| D: 1138 | SEQ ID NO: 1890 | mA*mG*mGmAmAmAmCmCfCfUfGmGmCmUmUmGmCmUmU*mG*mA |
| | SEQ ID NO: 2297 | mU*fC*mAmAfGmCfAmAmGmCmCmAmGfGmGfUmUmUmCmCmU*mG*mG |
| D: 1139 | SEQ ID NO: 1892 | mG*mU*mGmCmCmUmAmGfUfUfCmCmUmGmUmGmGmCmC*mA*mA |
| | SEQ ID NO: 2298 | mU*fU*mGmGfCmCfAmCmAmGmGmAmAfCmUfAmGmGmCmAmC*mA*mG |
| D: 1140 | SEQ ID NO: 1894 | mG*mU*mUmCmCmUmGmUfGfGfCmCmAmGmGmAmGmGmU*mU*mA |
| | SEQ ID NO: 2299 | mU*fA*mAmCfCmUfCmCmUmGmGmCmCfAmCfAmGmGmAmAmC*mU*mA |
| D: 1141 | SEQ ID NO: 1896 | mC*mU*mGmUmGmGmCmCfAfGfGmAmGmGmUmUmGmGmU*mG*mA |
| | SEQ ID NO: 2300 | mU*fC*mAmCfCmAfAmCmCmUmCmCmUfGmGfCmCmAmCmAmG*mG*mA |
| D: 1142 | SEQ ID NO: 1898 | mG*mC*mCmAmGmGmAmGfGfUfUmGmGmUmGmAmCmUmG*mA*mA |
| | SEQ ID NO: 2301 | mU*fU*mCmAfGmUfCmAmCmCmAmAmCfCmUfCmCmUmGmGmC*mC*mA |
| D: 1143 | SEQ ID NO: 1900 | mC*mA*mGmAmGmUmUmAfUfUfGmAmAmUmCmUmUmAmA*mU*mA |
| | SEQ ID NO: 2302 | mU*fA*mUmUfAmAfGmAmUmUmCmAmAfUmAfAmCmUmCmUmG*mC*mU |
| D: 1144 | SEQ ID NO: 1902 | mA*mG*mAmGmUmUmAmUfUfGfAmAmUmCmUmUmAmAmU*mU*mA |
| | SEQ ID NO: 2303 | mU*fA*mAmUfUmAfAmGmAmUmUmCmAfAmUfAmAmCmUmCmU*mG*mC |
| D: 1145 | SEQ ID NO: 1904 | mG*mA*mGmUmUmAmUmUfGfAfAmUmCmUmUmAmAmUmU*mU*mA |
| | SEQ ID NO: 2304 | mU*fA*mAmAfUmUfAmAmGmAmUmUmCfAmAfUmAmAmCmUmC*mU*mG |
| D: 1146 | SEQ ID NO: 1906 | mU*mU*mUmUmUmAmAmUfGfUfAmCmAmAmGmUmUmUmU*mG*mA |
| | SEQ ID NO: 2305 | mU*fC*mAmAfAmAfCmUmUmGmUmAmCfAmUfUmAmAmAmAmA*mA*mA |
| D: 1147 | SEQ ID NO: 1908 | mU*mU*mUmAmAmUmGmUfAfCfAmAmGmUmUmUmUmGmU*mA*mA |
| | SEQ ID NO: 2306 | mU*fU*mAmCfAmAfAmAmCmUmUmGmUfAmCfAmUmUmAmAmA*mA*mA |
| D: 1148 | SEQ ID NO: 1910 | mA*mA*mAmUmAmAmUmAfAfAfGmAmAmCmUmCmCmUmU*mA*mA |
| | SEQ ID NO: 2307 | mU*fU*mAmAfGmGfAmGmUmUmCmUmUfUmAfUmUmAmUmUmU*mA*mU |
| D: 1149 | SEQ ID NO: 1912 | mA*mA*mUmAmAmUmAmAfAfGfAmAmCmUmCmCmUmUmA*mU*mA |
| | SEQ ID NO: 2308 | mU*fA*mUmAfAmGfGmAmGmUmUmCmUfUmUfAmUmUmAmUmU*mU*mA |
| D: 1150 | SEQ ID NO: 1914 | mA*mU*mAmAmUmAmAmAfGfAfAmCmUmCmCmUmUmAmU*mU*mA |
| | SEQ ID NO: 2309 | mU*fA*mAmUfAmAfGmGmAmGmUmUmCfUmUfUmAmUmUmAmU*mU*mU |
| D: 1151 | SEQ ID NO: 1916 | mU*mA*mAmUmAmAmAmGfAfAfCmUmCmCmUmUmAmUmU*mU*mA |
| | SEQ ID NO: 2310 | mU*fA*mAmAfUmAfAmGmGmAmGmUmUfCmUfUmUmAmUmUmA*mU*mU |
| D: 1152 | SEQ ID NO: 1918 | mA*mA*mUmAmAmAmGmAfAfCfUmCmCmUmUmAmUmUmU*mU*mA |
| | SEQ ID NO: 2311 | mU*fA*mAmAfAmUfAmAmGmGmAmGmUfUmCfUmUmUmAmUmU*mA*mU |
| D: 1153 | SEQ ID NO: 1920 | mA*mC*mAmUmCmUmAmAfUfGfCmUmUmCmAmAmGmUmG*mU*mA |
| | SEQ ID NO: 2312 | mU*fA*mCmAfCmUfUmGmAmAmGmCmAfUmUfAmGmAmUmGmU*mA*mA |
| D: 1154 | SEQ ID NO: 1922 | mU*mC*mUmGmAmGmCmUfUfUfUmCmAmUmGmGmAmAmG*mU*mA |
| | SEQ ID NO: 2313 | mU*fA*mCmUfUmCfCmAmUmGmAmAmAfAmGfCmUmCmAmGmA*mA*mA |
| D: 1155 | SEQ ID NO: 1924 | mU*mG*mAmGmCmUmUmUfUfCfAmUmGmGmAmAmGmUmG*mG*mA |
| | SEQ ID NO: 2314 | mU*fC*mCmAfCmUfUmCmCmAmUmGmAfAmAfAmGmCmUmCmA*mG*mA |
| D: 1156 | SEQ ID NO: 1926 | mA*mG*mCmUmUmUmUmCfAfUfGmGmAmAmGmUmGmGmC*mA*mA |
| | SEQ ID NO: 2315 | mU*fU*mGmCfCmAfCmUmUmCmCmAmUfGmAfAmAmAmGmCmU*mC*mA |
| D: 1157 | SEQ ID NO: 1928 | mU*mU*mCmAmUmGmGmAfAfGfUmGmGmCmAmGmUmGmA*mA*mA |
| | SEQ ID NO: 2316 | mU*fU*mUmCfAmCfUmGmCmCmAmCmUfUmCfCmAmUmGmAmA*mA*mA |
| D: 1158 | SEQ ID NO: 1930 | mU*mU*mAmAmUmGmUmUfUfUfGmUmAmCmAmAmUmUmA*mC*mA |
| | SEQ ID NO: 2317 | mU*fG*mUmAfAmUfUmGmUmAmCmAmAfAmAfCmAmUmUmAmA*mU*mC |

m indicates 2′O-methyl modified ribose on the listed nucleotide
f indicates 2′F modified ribose on the listed nucleotide
*indicates a phosphorothioate bond (in place of a phosphodiester bond)

### Example 4

In vitro knockdown of human HMGCR in Hep3B cells with cholesterol-conjugated HMGCR siRNA

[0132] Knockdown of human HMGCR expression by the cholesterol-conjugated HMGCR siRNA was assayed using the following procedure: On day 1, Hep3B cells (ATCC) were added to Corning 96-well plates at 5,000 cells per well in growth media, on day 2, the culture media was replaced with ACCELL Media (Dharmacon) and siRNA were added directly to the well. For single point (SP) screening, 1 μM (1,000 nM) of cholesterol-conjugated siRNA was used. To generate concentration/dose response curves final concentrations of 1000, 200, 40, 8, 1.6, 0.32, and 0.064 nM of cholesterol-conjugated siRNA concentration was used. Treated cells were lysed and followed with gene expression by using the TaqMan Fast Advanced Cells-to-Ct Kit (Invitrogen). The cell lysates were used immediately for cDNA synthesis using Fast Advanced RT Master Mix (Invitrogen) and using the following steps in a thermocycler: 37° C. for 30 minutes, 95° C. for 5 minutes, and 4° C. hold. Quantitative Polymerase Chain Reaction (qPCR) was performed via TaqMan Gene Expression Assay (Invitrogen) using the following cycles temperatures and times: 50° C. for 2 minutes, 95° C. for 20 seconds, 40 cycles of 95° C. for 1 seconds and 60° C. for 20 seconds. The human HMGCR levels were normalized to human Rplp0 (Life Technologies) and represent the relative knockdown of human HMGCR mRNA expression as compared to vehicle-treated control cells. IC50 values were calculated using a 4-parameter fit model using XLFit.

TABLE 5
Percent Inhibition of human HMGCR expression in Hep3B cells

| | |
|---|---|
| | In vitro knockdown |
| In vitro knockdown | of hHMGCR |
| of hHMGCR | in Hep3B cells |

| | in Hep3B cells | | % Max |
|---|---|---|---|
| Duplex No: | % KD | IC50 (nM) | KD |
| Duplex No: 387 | 13.23 | | |
| Duplex No: 388 | 46.42 | 762.00 | 51.78 |
| Duplex No: 389 | 34.08 | | |
| Duplex No: 390 | 41.88 | | |
| Duplex No: 391 | 14.33 | | |
| Duplex No: 392 | 23.32 | | |
| Duplex No: 393 | 25.68 | | |
| Duplex No: 394 | 12.53 | | |
| Duplex No: 395 | 15.44 | | |
| Duplex No: 396 | 8.80 | | |
| Duplex No: 397 | 25.25 | | |
| Duplex No: 398 | 7.52 | | |
| Duplex No: 399 | 13.78 | | |
| Duplex No: 400 | 15.06 | | |
| Duplex No: 401 | 30.21 | | |
| Duplex No: 402 | 22.46 | | |
| Duplex No: 403 | 0.41 | | |
| Duplex No: 404 | 10.90 | | |
| Duplex No: 405 | 26.99 | | |
| Duplex No: 406 | 3.36 | | |
| Duplex No: 407 | 5.73 | | |
| Duplex No: 408 | 10.67 | | |
| Duplex No: 409 | 13.04 | | |
| Duplex No: 410 | 8.67 | | |
| Duplex No: 411 | 1.70 | | |
| Duplex No: 412 | 23.08 | | |
| Duplex No: 413 | 10.62 | | |
| Duplex No: 414 | 13.93 | | |
| Duplex No: 415 | 9.14 | | |
| Duplex No: 416 | 13.65 | | |
| Duplex No: 417 | 21.52 | | |
| Duplex No: 418 | 24.88 | | |
| Duplex No: 419 | 14.20 | | |
| Duplex No: 420 | 16.23 | | |
| Duplex No: 421 | 12.44 | | |
| Duplex No: 422 | 7.75 | | |
| Duplex No: 423 | 7.70 | | |
| Duplex No: 424 | 14.80 | | |
| Duplex No: 425 | 23.15 | | |
| Duplex No: 426 | 18.49 | | |
| Duplex No: 427 | −2.29 | | |
| Duplex No: 428 | 10.64 | | |
| Duplex No: 429 | −4.12 | | |
| Duplex No: 430 | 14.25 | | |
| Duplex No: 431 | 1.60 | | |
| Duplex No: 432 | 8.05 | | |
| Duplex No: 433 | 4.82 | | |
| Duplex No: 434 | 4.53 | | |
| Duplex No: 435 | 4.47 | | |
| Duplex No: 436 | 0.47 | | |
| Duplex No: 437 | −10.58 | | |
| Duplex No: 438 | −4.59 | | |
| Duplex No: 439 | −3.83 | | |
| Duplex No: 440 | 2.19 | | |
| Duplex No: 441 | 12.76 | | |
| Duplex No: 442 | 62.11 | 277.90 | 69.48 |
| Duplex No: 443 | 11.88 | N/A | 27.15 |
| Duplex No: 444 | 47.64 | 1348.00 | 52.74 |
| Duplex No: 445 | 57.54 | 525.80 | 63.76 |
| Duplex No: 446 | 54.19 | 715.30 | 64.75 |
| Duplex No: 447 | 43.92 | 578.80 | 52.45 |
| Duplex No: 448 | 52.15 | 939.10 | 61.38 |
| Duplex No: 449 | 4.08 | | |
| Duplex No: 450 | 6.85 | | |
| Duplex No: 451 | −7.04 | | |
| Duplex No: 452 | 1.88 | | |
| Duplex No: 453 | 0.79 | | |
| Duplex No: 454 | 1.05 | | |
| Duplex No: 455 | −3.28 | | |
| Duplex No: 456 | 37.60 | | |
| Duplex No: 457 | 11.68 | | |
| Duplex No: 458 | 13.31 | | |
| Duplex No: 459 | 33.54 | | |
| Duplex No: 460 | 18.92 | | |
| Duplex No: 461 | 17.06 | | |
| Duplex No: 462 | 30.31 | | |
| Duplex No: 463 | 9.99 | | |
| Duplex No: 464 | 43.96 | | |
| Duplex No: 465 | 6.07 | | |
| Duplex No: 466 | 16.21 | | |
| Duplex No: 467 | 0.51 | | |
| Duplex No: 468 | 23.02 | | |
| Duplex No: 469 | 14.12 | | |
| Duplex No: 470 | −2.99 | | |
| Duplex No: 471 | 44.32 | | |
| Duplex No: 472 | 27.25 | | |
| Duplex No: 473 | 6.83 | | |
| Duplex No: 474 | 7.57 | | |
| Duplex No: 475 | 16.62 | | |
| Duplex No: 476 | 19.67 | | |
| Duplex No: 477 | −7.45 | | |
| Duplex No: 478 | −15.39 | | |
| Duplex No: 479 | −2.76 | | |
| Duplex No: 480 | −8.95 | | |
| Duplex No: 481 | 5.65 | | |
| Duplex No: 482 | 0.43 | | |
| Duplex No: 483 | −2.74 | | |
| Duplex No: 484 | 2.76 | | |
| Duplex No: 485 | 33.49 | | |
| Duplex No: 486 | 51.41 | 494.40 | 66.02 |
| Duplex No: 487 | 23.83 | | |
| Duplex No: 488 | 17.62 | | |
| Duplex No: 489 | 40.85 | | |
| Duplex No: 490 | −6.31 | | |
| Duplex No: 491 | 7.85 | | |
| Duplex No: 492 | 31.11 | | |
| Duplex No: 493 | 36.88 | | |
| Duplex No: 494 | 22.56 | | |
| Duplex No: 495 | 10.89 | | |
| Duplex No: 496 | 11.43 | | |
| Duplex No: 497 | −1.59 | | |
| Duplex No: 498 | 19.73 | | |
| Duplex No: 499 | 7.55 | | |
| Duplex No: 500 | 12.45 | | |
| Duplex No: 501 | −1.95 | | |
| Duplex No: 502 | −6.74 | | |
| Duplex No: 503 | 29.43 | | |
| Duplex No: 504 | 25.83 | | |
| Duplex No: 505 | 44.02 | | |
| Duplex No: 506 | 36.31 | | |
| Duplex No: 507 | −9.44 | | |
| Duplex No: 508 | 2.36 | | |
| Duplex No: 509 | 18.13 | | |
| Duplex No: 510 | −1.01 | | |
| Duplex No: 511 | 6.94 | | |
| Duplex No: 512 | 34.04 | | |
| Duplex No: 513 | 14.93 | | |
| Duplex No: 514 | 21.16 | | |
| Duplex No: 515 | 1.21 | | |
| Duplex No: 516 | 9.40 | | |
| Duplex No: 517 | −7.15 | | |
| Duplex No: 518 | 6.16 | | |
| Duplex No: 519 | −2.27 | | |
| Duplex No: 520 | −5.11 | | |
| Duplex No: 521 | 0.28 | | |
| Duplex No: 522 | −2.56 | | |
| Duplex No: 523 | 13.59 | | |
| Duplex No: 524 | 19.50 | | |
| Duplex No: 525 | 2.06 | | |
| Duplex No: 526 | 8.65 | | |
| Duplex No: 527 | −7.83 | | |
| Duplex No: 528 | 19.94 | | |
| Duplex No: 529 | 2.87 | | |
| Duplex No: 530 | 14.31 | | |
| Duplex No: 531 | −0.30 | | |
| Duplex No: 532 | 5.79 | | |
| Duplex No: 533 | 8.21 | | |
| Duplex No: 534 | 25.52 | | |
| Duplex No: 535 | 31.12 | | |
| Duplex No: 536 | 15.22 | | |
| Duplex No: 537 | 10.26 | | |
| Duplex No: 538 | 13.48 | | |
| Duplex No: 539 | −21.78 | | |
| Duplex No: 540 | 10.34 | | |
| Duplex No: 541 | 3.92 | | |
| Duplex No: 542 | 3.15 | | |
| Duplex No: 543 | 5.57 | | |
| Duplex No: 544 | 14.47 | | |
| Duplex No: 545 | 16.30 | | |
| Duplex No: 546 | −38.40 | | |
| Duplex No: 547 | −5.49 | | |
| Duplex No: 548 | 8.41 | | |
| Duplex No: 549 | −2.80 | | |
| Duplex No: 550 | −2.32 | | |
| Duplex No: 551 | −0.39 | | |
| Duplex No: 552 | 6.96 | | |
| Duplex No: 553 | 0.72 | | |
| Duplex No: 554 | 31.04 | | |
| Duplex No: 555 | 33.71 | | |
| Duplex No: 556 | 8.14 | | |
| Duplex No: 557 | −2.11 | | |
| Duplex No: 558 | 10.27 | | |
| Duplex No: 559 | 0.11 | | |
| Duplex No: 560 | 20.40 | | |
| Duplex No: 561 | 6.11 | | |
| Duplex No: 562 | 3.45 | | |
| Duplex No: 563 | −8.65 | | |
| Duplex No: 564 | 2.85 | | |
| Duplex No: 565 | 9.37 | | |
| Duplex No: 566 | −6.71 | | |
| Duplex No: 567 | −9.44 | | |
| Duplex No: 568 | 8.50 | | |
| Duplex No: 569 | 1.90 | | |
| Duplex No: 570 | 5.87 | | |
| Duplex No: 571 | 2.72 | | |
| Duplex No: 572 | 4.93 | | |
| Duplex No: 573 | 12.61 | | |
| Duplex No: 574 | 17.06 | | |
| Duplex No: 575 | −2.71 | | |
| Duplex No: 576 | 6.32 | | |
| Duplex No: 577 | −7.17 | | |
| Duplex No: 578 | 3.12 | | |
| Duplex No: 579 | −8.76 | | |
| Duplex No: 580 | 9.70 | | |
| Duplex No: 581 | 13.88 | | |
| Duplex No: 582 | 2.43 | | |
| Duplex No: 583 | −3.48 | | |
| Duplex No: 584 | 15.98 | | |
| Duplex No: 585 | 16.00 | | |
| Duplex No: 586 | 2.13 | | |
| Duplex No: 587 | 15.02 | | |
| Duplex No: 588 | 41.82 | | |
| Duplex No: 589 | 27.27 | | |
| Duplex No: 590 | 27.78 | | |
| Duplex No: 591 | 10.52 | | |
| Duplex No: 592 | 8.12 | | |
| Duplex No: 593 | 19.13 | | |
| Duplex No: 594 | 12.68 | | |
| Duplex No: 595 | 24.75 | | |
| Duplex No: 596 | 24.42 | | |
| Duplex No: 597 | 18.54 | | |
| Duplex No: 598 | 21.52 | | |
| Duplex No: 599 | −1.10 | | |
| Duplex No: 600 | 9.97 | | |
| Duplex No: 601 | 7.19 | | |
| Duplex No: 602 | 19.86 | | |
| Duplex No: 603 | 31.28 | | |
| Duplex No: 604 | 31.13 | | |
| Duplex No: 605 | 9.23 | | |
| Duplex No: 606 | 9.18 | | |
| Duplex No: 607 | 23.40 | | |
| Duplex No: 608 | 25.97 | | |
| Duplex No: 609 | 8.04 | | |
| Duplex No: 610 | 16.58 | | |
| Duplex No: 611 | 36.53 | | |
| Duplex No: 612 | 11.41 | | |
| Duplex No: 613 | 20.99 | | |
| Duplex No: 614 | 19.61 | | |
| Duplex No: 615 | −1.31 | | |
| Duplex No: 616 | 3.38 | | |
| Duplex No: 617 | 19.43 | | |
| Duplex No: 618 | 5.25 | | |
| Duplex No: 619 | 8.16 | | |
| Duplex No: 620 | 14.90 | | |
| Duplex No: 621 | 11.39 | | |
| Duplex No: 622 | 5.46 | | |
| Duplex No: 623 | −7.56 | | |
| Duplex No: 624 | 14.04 | | |
| Duplex No: 625 | 4.18 | | |
| Duplex No: 626 | 10.89 | | |
| Duplex No: 627 | −3.90 | | |
| Duplex No: 628 | 6.14 | | |
| Duplex No: 629 | 3.66 | | |
| Duplex No: 630 | 1.99 | | |
| Duplex No: 631 | 2.73 | | |
| Duplex No: 632 | −0.28 | | |
| Duplex No: 633 | 4.71 | | |
| Duplex No: 634 | 11.66 | | |
| Duplex No: 635 | 0.74 | | |
| Duplex No: 636 | −11.88 | | |
| Duplex No: 637 | 4.14 | | |
| Duplex No: 638 | 3.13 | | |
| Duplex No: 639 | 3.86 | | |
| Duplex No: 640 | 0.60 | | |
| Duplex No: 641 | 11.44 | | |
| Duplex No: 642 | 13.46 | | |
| Duplex No: 643 | −2.43 | | |
| Duplex No: 644 | −4.35 | | |
| Duplex No: 645 | −4.81 | | |
| Duplex No: 646 | 2.61 | | |
| Duplex No: 647 | 6.41 | | |
| Duplex No: 648 | 5.11 | | |
| Duplex No: 649 | 7.21 | | |
| Duplex No: 650 | 6.31 | | |
| Duplex No: 651 | 3.24 | | |
| Duplex No: 652 | 5.36 | | |
| Duplex No: 653 | −1.82 | | |
| Duplex No: 654 | 12.07 | | |
| Duplex No: 655 | 8.11 | | |
| Duplex No: 656 | 22.87 | | |
| Duplex No: 657 | 10.42 | | |
| Duplex No: 658 | 26.26 | | |
| Duplex No: 659 | −5.00 | | |
| Duplex No: 660 | 0.38 | | |
| Duplex No: 661 | −3.12 | | |
| Duplex No: 662 | 13.23 | | |
| Duplex No: 663 | 38.31 | | |
| Duplex No: 664 | 25.80 | | |
| Duplex No: 665 | 47.53 | 451.40 | 64.94 |
| Duplex No: 666 | 21.80 | | |
| Duplex No: 667 | 26.57 | | |
| Duplex No: 668 | 17.67 | | |
| Duplex No: 669 | 31.81 | | |
| Duplex No: 670 | 34.65 | | |
| Duplex No: 671 | 26.48 | | |
| Duplex No: 672 | 8.84 | | |
| Duplex No: 673 | 49.49 | 1200.00 | 59.73 |
| Duplex No: 674 | 40.69 | | |
| Duplex No: 675 | 46.17 | 2908.00 | 49.25 |
| Duplex No: 676 | 6.92 | | |
| Duplex No: 677 | 14.98 | | |
| Duplex No: 678 | 15.26 | | |
| Duplex No: 679 | 42.03 | | |
| Duplex No: 680 | 16.55 | | |
| Duplex No: 681 | 27.23 | | |
| Duplex No: 682 | 13.66 | | |
| Duplex No: 683 | 18.85 | | |
| Duplex No: 684 | 15.46 | | |
| Duplex No: 685 | 14.74 | | |
| Duplex No: 686 | 24.53 | | |
| Duplex No: 687 | 15.87 | | |
| Duplex No: 688 | 5.10 | | |
| Duplex No: 689 | 17.03 | | |
| Duplex No: 690 | 20.51 | | |
| Duplex No: 691 | 14.14 | | |
| Duplex No: 692 | 17.03 | | |
| Duplex No: 693 | 3.63 | | |
| Duplex No: 694 | 12.25 | | |
| Duplex No: 695 | 13.06 | | |
| Duplex No: 696 | 16.09 | | |
| Duplex No: 697 | 19.25 | | |
| Duplex No: 698 | 18.97 | | |
| Duplex No: 699 | 3.34 | | |
| Duplex No: 700 | 3.19 | | |
| Duplex No: 701 | 16.14 | | |
| Duplex No: 702 | 58.66 | 1187.00 | 62.35 |
| Duplex No: 703 | 20.41 | N/A | 27.83 |
| Duplex No: 704 | 37.09 | 783.70 | 42.38 |
| Duplex No: 705 | 70.31 | 248.00 | 74.74 |
| Duplex No: 706 | 60.00 | 611.60 | 63.64 |
| Duplex No: 707 | 68.64 | 303.80 | 72.68 |
| Duplex No: 708 | 29.38 | N/A | 35.98 |
| Duplex No: 709 | 45.92 | 686.90 | 57.23 |
| Duplex No: 710 | 3.55 | | |
| Duplex No: 711 | 7.26 | | |
| Duplex No: 712 | 29.77 | | |
| Duplex No: 713 | 15.73 | | |
| Duplex No: 714 | 17.49 | | |
| Duplex No: 715 | 43.64 | | |
| Duplex No: 716 | 12.56 | | |
| Duplex No: 717 | 2.20 | | |
| Duplex No: 718 | 34.02 | | |
| Duplex No: 719 | 14.30 | | |
| Duplex No: 720 | 15.77 | | |
| Duplex No: 721 | 26.74 | | |
| Duplex No: 722 | 20.58 | | |
| Duplex No: 723 | 20.83 | | |
| Duplex No: 724 | 11.27 | | |
| Duplex No: 725 | 4.56 | | |
| Duplex No: 726 | 16.20 | | |
| Duplex No: 727 | 22.49 | | |
| Duplex No: 728 | 36.14 | | |
| Duplex No: 729 | 22.28 | | |
| Duplex No: 730 | 18.83 | | |
| Duplex No: 731 | 61.63 | 320.90 | 70.18 |
| Duplex No: 732 | 30.26 | N/A | 35.54 |
| Duplex No: 733 | 47.31 | 1293.00 | 58.60 |
| Duplex No: 734 | 3.94 | N/A | 15.41 |
| Duplex No: 735 | 46.17 | 2154.00 | 51.25 |
| Duplex No: 736 | 24.25 | | |
| Duplex No: 737 | 18.86 | | |
| Duplex No: 738 | 26.23 | | |
| Duplex No: 739 | 26.24 | | |
| Duplex No: 740 | 13.30 | | |
| Duplex No: 741 | 25.65 | | |
| Duplex No: 742 | 14.77 | | |
| Duplex No: 743 | 28.64 | | |
| Duplex No: 744 | 23.39 | | |
| Duplex No: 745 | 57.11 | 380.40 | 64.50 |
| Duplex No: 746 | 34.00 | | |
| Duplex No: 747 | 28.79 | | |
| Duplex No: 748 | 38.96 | | |
| Duplex No: 749 | 37.46 | | |
| Duplex No: 750 | 39.39 | | |
| Duplex No: 751 | 33.99 | | |
| Duplex No: 752 | 0.20 | | |
| Duplex No: 753 | 10.32 | N/A | 30.26 |
| Duplex No: 754 | 9.14 | | |
| Duplex No: 755 | 15.83 | | |
| Duplex No: 756 | 15.98 | | |
| Duplex No: 757 | 35.90 | | |
| Duplex No: 758 | 29.49 | | |
| Duplex No: 759 | 22.98 | | |
| Duplex No: 760 | −2.21 | | |
| Duplex No: 761 | 29.14 | | |
| Duplex No: 762 | 11.12 | | |
| Duplex No: 763 | 32.27 | | |
| Duplex No: 764 | 32.72 | | |
| Duplex No: 765 | 12.28 | | |
| Duplex No: 766 | 16.57 | | |
| Duplex No: 767 | −3.77 | | |
| Duplex No: 768 | 6.49 | | |
| Duplex No: 769 | 15.02 | | |
| Duplex No: 770 | 4.25 | | |
| Duplex No: 771 | 11.50 | | |
| Duplex No: 772 | −3.65 | | |

Table 5: shows the result of a single dose screen in Hep3B cells by free uptake with the indicated cholesterol conjugated HMGCR siRNA. Data are expressed as percent of message knockdown relative to untreated cells. The IC50 and percent maximum knockdown of top hits from single point screening followed by concentration/dose response curves are included as well.

### Example 5

In vitro knockdown of HMGCR in wildtype mouse primary hepatocytes (MPH) and Hep3B cells with GalNAc-conjugated HMGCR siRNA

[0133] Knockdown of mouse HMGCR expression by the LYGal1-conjugated HMGCR siRNA was assayed using the following procedure: mouse primary hepatocytes (MPH) were freshly isolated from a wildtype mouse, added to Corning plates at 15,000 per well, and siRNA were added directly to the well. For Hep3B (ATCC) cells, transfection reagent RNAiMAX (Life Technologies) at 0.3 μL/well was mixed with siRNA in Corning plates before adding cells at 20,000 per well. To generate concentration/dose response curves final concentrations of 1000, 333, 111, 37, 12, 4, 1.37, 0.46, 0.15, 0.05, and 0.017 nM of GalNAc-conjugated siRNA concentration was used for MPH. For Hep3B, concentration/dose response curves final concentrations of 10, 3.33, 1.11, 0.37, 0.12, 0.04, 0.014, 0.005, 0.002, 0.0005, and 0.0002 nM of GalNAc-conjugated siRNA concentration was used.

[0134] Treated cells were lysed and RNA was isolated using the Quick-RNA 96 Kit (Zymo Research) directly into the 96 well plate. The eluted RNA was used immediately or stored frozen. cDNA was synthesized using Fast Advanced RT Master Mix (Invitrogen) and using the following steps in a thermocycler: 37° C. for 30 minutes, 95° C. for 5 minutes, and 4° C. hold. Polymerase Chain Reaction (PCR) was performed via TaqMan RT PCR (Life Technologies) using the following cycles temperatures and times: 50° C. for 2 minutes, 95° C. for 10 minutes, 40 cycles of 95° C. for 15 seconds and 60° C. for 1 minute.

[0135] The mouse or human HMGCR levels were normalized to mouse (for MPH) or human (for Hep3B) Rplp0 (Life Technologies) and represent the relative knockdown of mouse or human HMGCR mRNA expression as compared to vehicle-treated control cells. IC50 values are calculated using a 4-parameter fit model using XLFit.

TABLE 6
In vitro knockdown of HMGCR in wildtype mouse
primary hepatocytes (MPH) and Hep3B cells
with GalNAc-conjugated HMGCR siRNA

| | In vitro knockdown | | In vitro knockdown | |
|---|---|---|---|---|
| | of mHmgcr in MPH | | of hHMGCR in Hep3B/RNAiMAX | |
| Duplex | IC50 | % Max | IC50 | % Max |
| NO: | (nM) | KD | (nM) | KD |
| D: 388 | 10.26 | 64.46 | 0.011 | 89.27 |
| D: 442 | 4.65 | 85.36 | 0.014 | 85.14 |
| D: 443 | 9.22 | 71.97 | | |
| D: 444 | 6.05 | 78.73 | 0.029 | 91.38 |
| D: 445 | 6.33 | 71.57 | | |
| D: 446 | 15.90 | 67.94 | | |
| D: 447 | 4.06 | 86.52 | | |
| D: 448 | 5.18 | 76.92 | 0.050 | 92.69 |
| D: 486 | 6.13 | 70.19 | | |
| D: 665 | 0.05 | 19.00 | | |
| D: 673 | 994.50 | 41.00 | | |
| D: 675 | 0.40 | 25.66 | | |
| D: 702 | 1.82 | 81.81 | | |
| D: 703 | 328.10 | 8.40 | | |
| D: 704 | 0.02 | 3.66 | | |
| D: 705 | 22.89 | 65.70 | | |
| D: 706 | 8.80 | 82.97 | 0.018 | 86.72 |
| D: 707 | 11.33 | 79.84 | 0.012 | 86.05 |
| D: 708 | 89.29 | 23.37 | | |
| D: 709 | 13.93 | 63.62 | | |
| D: 731 | 19.33 | 71.49 | | |
| D: 732 | 2.70 | 66.14 | | |
| D: 733 | 16.80 | 51.62 | | |
| D: 734 | 144.70 | 46.15 | | |
| D: 735 | 246.60 | 56.51 | 0.006 | 86.22 |
| D: 745 | 3.36 | 68.72 | | |
| D: 753 | 1000.00 | 37.00 | | |
| D: 774 | 2.347 | 76.53 | | |
| D1121 | 30.5 | 62.42 | | |
| D: 830 | 1.521 | 87.12 | 0.09439 | 91.737 |
| D: 834 | 4.726 | 88.79 | 0.2684 | 90.154 |
| D: 828 | 4.749 | 79.04 | 0.07811 | 87.94 |
| D: 1092 | 8.909 | 71.37 | 0.09661 | 90.06 |
| D: 1093 | 14.73 | 67.58 | 0.2028 | 93.36 |

Table 6: shows the result of IC50 with percent maximum knockdown of top hits from single point screen in wildtype mouse primary hepatocytes by free uptake and Hep3B cells by transfection reagent, RNAiMAX, with the indicated HMGCR siRNA. Data are expressed as percent of HMGCR message knockdown relative to untreated cells.

### Example 6: In Vivo Single Dose Screen Mouse HMGCR KD

[0136] GalNAc-siRNA were tested in male C57bl/6 mice (n=7) (Taconic farms). Mice were assigned to groups with similar body weight. Either PBS or GalNac-siRNA test article, at a dose of 5 mg/kg, was administered subcutaneously to mice. Seven days post subcutaneous injection, blood was collected from all mice. Fourteen days post subcutaneous injection mice were euthanized under isoflurane anesthesia. Blood was collected by cardiac puncture. Liver was collected from the mice and frozen in liquid nitrogen. Livers were homogenized in TriZol (Invitrogen) using Lysing Matrix D bead tubes on a FastPrep-24 (MP Bio). Chloroform was added and the aqueous phase was mixed with ethanol to precipitate the RNA. RNA was isolated on columns using PureLink Pro96 Total RNA purification kit (Invitrogen) according to manufacturer's protocol and quantified on a NanoDrop (Thermo Fisher). Equal amounts (1 ug) of RNA were reverse transcribed to cDNA using High-Capacity cDNA Reverse Transcription kit (Life Technologies) on Mastercycler Nexus (Eppendorf). Thermocycler settings were 25° C. for 10 min, 37° C. for 2 hrs, then 85° C. for 5 min. Template cDNA was combined with Taqman Universal Master Mix and Assays on Demand primer/probe sets and RT-PCR was performed on the QuantStudio Pro7 (Thermo Fisher) with the following parameters: 50° C. for 2 min, 95° C. for 10 min then 40 cycles of 95° C. for 15 sec and 60° C. for 1 min. Fold changes (FC) were calculated as follows: the CT value of mouse Rplp0 was subtracted from CT value of mouse HMGCR to obtain the delta CT value. Then the delta delta CT value was calculated by subtracting the delta CT value of the untreated sample (average of PBS control) from the delta CT value of each test sample. Fold change was calculated by taking the log base 2 of the negative delta delta CT value. mRNA percent Knockdown (KD) was calculated by subtracting the fold change from the fold change of the PBS group and then multiplying by −100. Data was shown in Table 7.

TABLE 7
In vivo single dose Screen mouse HMGCR KD

| Duplex | Dose | 2-week % |
|---|---|---|
| NO: | mg/kg | KD |
| D: 447 | 5 | −56.8 |
| D: 442 | 5 | −63.3 |
| D: 706 | 5 | −53.2 |
| D: 702 | 5 | −26.2 |
| D: 707 | 5 | −57.7 |
| D: 444 | 5 | −58.7 |
| D: 448 | 5 | −64.1 |
| D: 443 | 5 | 24.3 |
| D: 445 | 5 | −0.1 |
| D: 731 | 5 | −15.3 |
| D: 486 | 5 | −7.0 |
| D: 745 | 5 | −21.2 |
| D: 446 | 5 | −37.3 |
| D: 732 | 5 | −23.4 |
| D: 705 | 5 | −52.6 |
| D: 388 | 5 | −65.3 |
| D: 709 | 5 | −17.5 |
| D: 735 | 5 | −54.8 |
| D: 733 | 5 | −46.1 |
| D: 734 | 5 | −45.0 |
| D: 673 | 5 | −18.6 |
| D: 753 | 5 | −38.4 |
| D: 707 | 5 | −34.5 |
| D: 706 | 5 | −31.1 |
| D: 442 | 5 | −58.6 |
| D: 448 | 5 | −65.7 |
| D: 444 | 5 | −47.7 |
| D: 388 | 5 | −45.5 |
| D: 735 | 5 | −42.5 |

### Example 7: In Vivo Durability 8-Week Mouse HMGCR KD

[0137] GalNAc-siRNA were tested in male mice C57/BL6 mice (n=9) (Taconic Farms). Body weight of mice was measured and mice were assigned to groups with similar body weight. PBS or test article GalNac-siRNA, at doses of 0.3, 1.75 and 10 mg/kg were administered subcutaneously to mice. At 2 weeks post siRNA administration, 3 mice from each group were euthanized under isoflurane anesthesia, blood was collected. Liver was collected from the mice and frozen in liquid nitrogen. Blood was collected from the remaining mice (n=6/group) at 2, 4, and 6-weeks post siRNA administration under isoflurane anesthesia. At 8 weeks post siRNA administration, the remaining mice (n=6) were euthanized under isoflurane anesthesia. Blood and liver were collected from mice. Livers were processed and mRNA percent KD was calculated as described in the in vivo single dose screen.

TABLE 8
In vivo durability 8-week mouse HMGCR KD

| Duplex | Dose | 2-week % | 8-week % |
|---|---|---|---|
| No: | mg/kg | KD | KD |
| D: 388 | 0.3 | 37 | −1 |
| D: 388 | 1.75 | 39 | −9 |
| D: 388 | 10 | 47 | −41 |
| D: 735 | 0.3 | 7 | 6 |
| D: 735 | 1.75 | 20 | 4 |
| D: 735 | 10 | 28 | −44 |
| D: 734 | 0.3 | −18 | 0 |
| D: 734 | 1.75 | −1 | 38 |
| D: 734 | 10 | 18 | 45 |
| D: 444 | 0.3 | −38 | 2 |
| D: 444 | 1.75 | −36 | −21 |
| D: 444 | 10 | −64 | −30 |
| D: 448 | 0.3 | −30 | 2 |
| D: 448 | 1.75 | −4 | 5 |
| D: 448 | 10 | −64 | −45 |
| D: 442 | 0.3 | −29 | −14 |
| D: 442 | 1.75 | −35 | −34 |
| D: 442 | 10 | −44 | −33 |
| D: 706 | 0.3 | 26 | −12 |
| D: 706 | 1.75 | −47 | 11 |
| D: 706 | 10 | −57 | −43 |
| D: 707 | 0.3 | −36 | 6 |
| D: 707 | 1.75 | −55 | −5 |
| D: 707 | 10 | −76 | −38 |

### Example 8: In vivo with AAV8 Single dose Screen human HMGCR KD

[0138] GalNAc-siRNA were tested in male C57bl/6 mice (n=7) (Taconic farms). The siRNAs were tested in a single study. Mice were dosed by retro-orbital injection with an adeno-associated virus (AAV) vector containing a plasmid with a TBGS1 promoter and the coding sequence and 3′UTR for human HMGCR (NM_000859.3) (Vector BioLabs). The body weight of mice was measured about 4 weeks post AAV administration. Mice were assigned to groups with similar body weight. Either PBS or GalNAc-siRNA test article, at a dose of 5 mg/kg, was administered subcutaneously to mice. Seven days post subcutaneous injection, blood was collected from the retro-orbital sinus from all mice. Fourteen days post subcutaneous injection mice were euthanized under isoflurane anesthesia. Blood was collected by cardiac puncture. Liver was collected from the mice and frozen in liquid nitrogen. Human HMGCR mRNA was quantified as described here. All reagents mentioned in the following sections come from the QuantiGene Singleplex assay kit made by Invitrogen. Approximately 10 mg of liver was weighed into a 96 well cluster tube plate. 300 μL of homogenizing buffer with proteinase k was added to each liver sample and homogenized on the Qiagen homogenizer for 12 minutes. The plate was centrifuged at 3500 rpm for 10 minutes and then heated at 60° C. for 30 minutes, with a vortexing step every 10 minutes. Samples were centrifuged again at 3500 rpm for 10 minutes and then diluted or used neat in the following steps. The working probe set for each gene of interest was prepared in separate tubes by combining the following reagents, in the order listed and scaled according to the number of wells to be run with required overage: nuclease-free water (25.4 μL), Lysis mixture (33.3 μL), Blocking Reagent (1 μL), QuantiGene Singleplex Probe Set (0.3 μL) per 1 well. The capture plate was prepared by dispensing 60 μL of the working probe sets into each well of the plate. Probes sets for mGAPDH (SB-10001) and hHMGCR (SA-11011) were aliquoted into the plate separately and then 60 μL of neat liver homogenate was added to the hHMGCR working set in the plate while 60 μL of the 20-fold dilution of RNA isolate was added to the mGAPDH probe set which was previously aliquoted into the capture plate. Introduction of bubbles was avoided, and the plate was not mixed. An adhesive seal was placed tightly on the plate and then it was incubated at 55±1° C. for 20.5 hours in order to hybridize the probes to the RNA targets. After 20.5 hours, 200 μL of 1× wash buffer was added to the capture plate and then inverted to remove the wash. The plate was then washed two more times with 300 μL of wash buffer for each wash. Next, 100 μL of pre-amplifier solution was added to the plate. It was sealed and incubated at 55±1° C. for 60 minutes. After 1 hour, the wash procedure above was repeated and 100 μL of amplifier solution was added to the plate. It was sealed and incubated at 55±1° C. for 60 minutes. After the 1-hour incubation, the wash steps were performed again and then 100 μL of label probe was added. It was sealed and incubated at 50±1° C. for 60 minutes. The wash steps were performed one additional time and then 100 μL of substrate was added at room temperature and incubated for 5 minutes while being protected from light. The plate was then read on a luminometer with the integration time set to 0.2 seconds. Gene knockdown was calculated by first dividing hHMGCR chemiluminescent signal by mGAPDH signal. The fold change from the PBS (control) group was calculated by dividing all groups by the average signal of the control group. Then % hHMGCR gene knockdown was calculated by subtracting the average control group fold change from all groups followed by dividing all of those group by the average signal from the control group.

TABLE 9
In vivo with AAV8 single dose screen human HMGCR KD

| Duplex | Dose | 2 Week |
|---|---|---|
| NO: | mg/kg | % KD |
| D: 448 | 5 | −62.5 |
| D: 442 | 5 | −66.4 |
| D: 707 | 5 | −59.6 |
| D: 735 | 5 | −33.6 |
| D: 705 | 5 | −58.0 |
| D: 731 | 5 | −64.1 |
| D: 745 | 5 | −55.2 |
| D: 486 | 5 | −54.8 |
| D: 665 | 5 | −63.9 |

1. An RNAi agent for reducing HMGCR gene expression, wherein the RNAi agent comprises a delivery moiety of Formula I conjugated to R, wherein R is a double stranded RNA (dsRNA) comprising an antisense strand and a sense strand: [chemical structure]
wherein R is conjugated to connection point E of Formula I, optionally via a linker, wherein the sense strand and the antisense strand form a duplex region, and wherein the antisense strand comprises a region of complementarity to a HMGCR mRNA target sequence of SEQ ID NO: 1, and wherein the sense and antisense strand each optionally comprise one or more modified nucleotides and one or more modified internucleotide linkages.

2. The RNAi agent of claim 1, wherein Formula I is conjugated to the 3′ terminal nucleotide of the sense strand, optionally via a linker.

3. (canceled)

4. The RNAi agent of claim 1, wherein the antisense strand is 15 to 50 nucleotides in length.

5. The RNAi agent of claim 1, wherein the sense strand is 15 to 50 nucleotides in length.

6. The RNAi agent of claim 1, wherein the antisense strand is between 18 and 23 nucleotides in length.

7. The RNAi agent of claim 1, wherein the sense strand is between 18 and 21 nucleotides in length.

8. The RNAi agent of claim 1, wherein the antisense strand is 23 nucleotides in length and the sense strand is 21 nucleotides in length.

9. The RNAi agent of claim 1, wherein the region of complementarity is at least 18 nucleotides in length.

10. The RNAi agent of claim 1, wherein the antisense strand comprises a sequence selected from the group consisting of SEQ ID NOs: 2 to 387.

11. The RNAi agent of claim 1, wherein the antisense strand has a nucleotide sequence selected from the group consisting of SEQ ID NOs: 774 to 1159, or a sequence having at least 90% sequence identity thereto.

12. The RNAi agent of claim 1, wherein the sense strand is selected from the group consisting of SEQ ID NOs: 388 to 773, or a sequence having at least 90% sequence identity thereto.

13. The RNAi agent of claim 1, wherein the sense strand or the antisense strand each independently comprise one or more modified nucleotides, and the modified nucleotides are independently 2′ fluoro modified nucleotide residues or 2′-O-methyl modified nucleotides.

14. (canceled)

15. The RNAi agent of claim 1, wherein each nucleotide of the sense strand and each nucleotide of the antisense strand is a modified nucleotide.

16. The RNAi agent of claim 1, wherein the antisense strand is 23 nucleotides in length and wherein each nucleotide of the antisense strand is a modified nucleotide, and 2′ fluoro modified nucleotides are present at
a. positions 2, 3, 7, 14, and 16 from the 5′ end of the antisense strand; or
b. positions 2, 5, 7, 14, and 16 from the 5′ end of the antisense strand; or
c. Positions 2, 3, 8, 14, and 16 from the 5′ end of the antisense strand; or
d. Positions 2, 5, 8, 14, and 16 from the 5′ end of the antisense strand; or
e. Positions 2, 6, 14, and 16 from the 5′ end of the antisense strand.

17. The RNAi agent of claim 1, wherein the sense strand and antisense strand each independently comprise one or more modified internucleotide linkages, and wherein each modified internucleotide linkage is a phosphorothioate linkage.

18.-19. (canceled)

20. The RNAi agent of claim 1, wherein the antisense strand comprises a sequence selected from the group consisting of SEQ ID NOs: 1161, 1163, 1165, 1167, 1169, 1171, 1173, 1175, 1177, 1179, 1181, 1183, 1185, 1187, 1189, 1191, 1193, 1195, 1197, 1199, 1201, 1203, 1205, 1207, 1209, 1211, 1213, 1215, 1217, 1219, 1221, 1223, 1225, 1227, 1229, 1231, 1233, 1235, 1237, 1239, 1241, 1243, 1245, 1247, 1249, 1251, 1253, 1255, 1257, 1259, 1261, 1263, 1265, 1267, 1269, 1271, 1273, 1275, 1277, 1279, 1281, 1283, 1285, 1287, 1289, 1291, 1293, 1295, 1297, 1299, 1301, 1303, 1305, 1307, 1309, 1311, 1313, 1315, 1317, 1319, 1321, 1323, 1325, 1327, 1329, 1331, 1333, 1335, 1337, 1339, 1341, 1343, 1345, 1347, 1349, 1351, 1353, 1355, 1357, 1359, 1361, 1363, 1365, 1367, 1369, 1371, 1373, 1375, 1377, 1379, 1381, 1383, 1385, 1387, 1389, 1391, 1393, 1395, 1397, 1399, 1401, 1403, 1405, 1407, 1409, 1411, 1413, 1415, 1417, 1419, 1421, 1423, 1425, 1427, 1429, 1431, 1433, 1435, 1437, 1439, 1441, 1443, 1445, 1447, 1449, 1451, 1453, 1455, 1457, 1459, 1461, 1463, 1465, 1467, 1469, 1471, 1473, 1475, 1477, 1479, 1481, 1483, 1485, 1487, 1489, 1491, 1493, 1495, 1497, 1499, 1501, 1503, 1505, 1507, 1509, 1511, 1513, 1515, 1517, 1519, 1521, 1523, 1525, 1527, 1529, 1531, 1533, 1535, 1537, 1539, 1541, 1543, 1545, 1547, 1549, 1551, 1553, 1555, 1557, 1559, 1561, 1563, 1565, 1567, 1569, 1571, 1573, 1575, 1577, 1579, 1581, 1583, 1585, 1587, 1589, 1591, 1593, 1595, 1597, 1599, 1601, 1603, 1605, 1607, 1609, 1611, 1613, 1615, 1617, 1619, 1621, 1623, 1625, 1627, 1629, 1631, 1633, 1635, 1637, 1639, 1641, 1643, 1645, 1647, 1649, 1651, 1653, 1655, 1657, 1659, 1661, 1663, 1665, 1667, 1669, 1671, 1673, 1675, 1677, 1679, 1681, 1683, 1685, 1687, 1689, 1691, 1693, 1695, 1697, 1699, 1701, 1703, 1705, 1707, 1709, 1711, 1713, 1715, 1717, 1719, 1721, 1723, 1725, 1727, 1729, 1731, 1733, 1735, 1737, 1739, 1741, 1743, 1745, 1747, 1749, 1751, 1753, 1755, 1757, 1759, 1761, 1763, 1765, 1767, 1769, 1771, 1773, 1775, 1777, 1779, 1781, 1783, 1785, 1787, 1789, 1791, 1793, 1795, 1797, 1799, 1801, 1803, 1805, 1807, 1809, 1811, 1813, 1815, 1817, 1819, 1821, 1823, 1825, 1827, 1829, 1831, 1833, 1835, 1837, 1839, 1841, 1843, 1845, 1847, 1849, 1851, 1853, 1855, 1857, 1859, 1861, 1863, 1865, 1867, 1869, 1871, 1873, 1875, 1877, 1879, 1881, 1883, 1885, 1887, 1889, 1891, 1893, 1895, 1897, 1899, 1901, 1903, 1905, 1907, 1909, 1911, 1913, 1915, 1917, 1919, 1921, 1923, 1925, 1927, 1929, 1931, or a sequence having at least 90% sequence identity thereto, wherein the 5′ terminal nucleotide of the antisense strand comprises a vinyl phosphonate, a phosphate, or a hydroxyl group.

21. (canceled)

22. The RNAi agent of claim 1, wherein the sense strand comprises a sequence selected from the group consisting of SEQ ID NOs: 1160, 1162, 1164, 1166, 1168, 1170, 1172, 1174, 1176, 1178, 1180, 1182, 1184, 1186, 1188, 1190, 1192, 1194, 1196, 1198, 1200, 1202, 1204, 1206, 1208, 1210, 1212, 1214, 1216, 1218, 1220, 1222, 1224, 1226, 1228, 1230, 1232, 1234, 1236, 1238, 1240, 1242, 1244, 1246, 1248, 1250, 1252, 1254, 1256, 1258, 1260, 1262, 1264, 1266, 1268, 1270, 1272, 1274, 1276, 1278, 1280, 1282, 1284, 1286, 1288, 1290, 1292, 1294, 1296, 1298, 1300, 1302, 1304, 1306, 1308, 1310, 1312, 1314, 1316, 1318, 1320, 1322, 1324, 1326, 1328, 1330, 1332, 1334, 1336, 1338, 1340, 1342, 1344, 1346, 1348, 1350, 1352, 1354, 1356, 1358, 1360, 1362, 1364, 1366, 1368, 1370, 1372, 1374, 1376, 1378, 1380, 1382, 1384, 1386, 1388, 1390, 1392, 1394, 1396, 1398, 1400, 1402, 1404, 1406, 1408, 1410, 1412, 1414, 1416, 1418, 1420, 1422, 1424, 1426, 1428, 1430, 1432, 1434, 1436, 1438, 1440, 1442, 1444, 1446, 1448, 1450, 1452, 1454, 1456, 1458, 1460, 1462, 1464, 1466, 1468, 1470, 1472, 1474, 1476, 1478, 1480, 1482, 1484, 1486, 1488, 1490, 1492, 1494, 1496, 1498, 1500, 1502, 1504, 1506, 1508, 1510, 1512, 1514, 1516, 1518, 1520, 1522, 1524, 1526, 1528, 1530, 1532, 1534, 1536, 1538, 1540, 1542, 1544, 1546, 1548, 1550, 1552, 1554, 1556, 1558, 1560, 1562, 1564, 1566, 1568, 1570, 1572, 1574, 1576, 1578, 1580, 1582, 1584, 1586, 1588, 1590, 1592, 1594, 1596, 1598, 1600, 1602, 1604, 1606, 1608, 1610, 1612, 1614, 1616, 1618, 1620, 1622, 1624, 1626, 1628, 1630, 1632, 1634, 1636, 1638, 1640, 1642, 1644, 1646, 1648, 1650, 1652, 1654, 1656, 1658, 1660, 1662, 1664, 1666, 1668, 1670, 1672, 1674, 1676, 1678, 1680, 1682, 1684, 1686, 1688, 1690, 1692, 1694, 1696, 1698, 1700, 1702, 1704, 1706, 1708, 1710, 1712, 1714, 1716, 1718, 1720, 1722, 1724, 1726, 1728, 1730, 1732, 1734, 1736, 1738, 1740, 1742, 1744, 1746, 1748, 1750, 1752, 1754, 1756, 1758, 1760, 1762, 1764, 1766, 1768, 1770, 1772, 1774, 1776, 1778, 1780, 1782, 1784, 1786, 1788, 1790, 1792, 1794, 1796, 1798, 1800, 1802, 1804, 1806, 1808, 1810, 1812, 1814, 1816, 1818, 1820, 1822, 1824, 1826, 1828, 1830, 1832, 1834, 1836, 1838, 1840, 1842, 1844, 1846, 1848, 1850, 1852, 1854, 1856, 1858, 1860, 1862, 1864, 1866, 1868, 1870, 1872, 1874, 1876, 1878, 1880, 1882, 1884, 1886, 1888, 1890, 1892, 1894, 1896, 1898, 1900, 1902, 1904, 1906, 1908, 1910, 1912, 1914, 1916, 1918, 1920, 1922, 1924, 1926, 1928, 1930, or a sequence having at least 90% sequence identity thereto.

23. (canceled)

24. The RNAi agent of claim 1, wherein the sense strand comprises a sequence selected from the group consisting of SEQ ID NOs: 1932-2317, or a sequence having at least 90% sequence identity thereto.

25. The RNAi agent of claim 1, wherein the sense strand comprises a sequence selected from the group consisting of SEQ ID NOs: 1932-2317, or a sequence having at least 95% sequence identity thereto.

26. The RNAi agent of claim 1, wherein the RNAi agent antisense strand comprises a first nucleic acid sequence that has at least 90% sequence identity to an antisense sequence of any one of Duplex NOs: 387-772 in Table 4A, and the sense strand comprises a second nucleic acid sequence that has at least 90% sequence identity to a sense sequence of the same Duplex in Table 4A.

27. The RNAi agent of claim 1, wherein the RNAi agent antisense strand comprises a first nucleic acid sequence that has at least 90% sequence identity to an antisense sequence of any one of Duplex NOs: 773-1158 in Table 4B, and the sense strand comprises a second nucleic acid sequence that has at least 90% sequence identity to a sense sequence of the same Duplex in Table 4B.

28.-29. (canceled)

30. The RNAi agent of claim 1, wherein R is conjugated to Formula I via a linker, and wherein linker comprises Formula II having connection points A and B or the linker comprises Formula III having connection points C and D, and wherein: [chemical structure]
a. Formula I at connection point E is conjugated to Formula II at connection point A and Formula II is conjugated to a phosphate group or a phosphorothioate group at connection point B, and the phosphate group or phosphorothioate group is conjugated to R; or
b. Formula I at connection point E is conjugated to Formula III at connection point C and Formula III is conjugated to a phosphate group or phosphorothioate group at connection point D, and the phosphate group or phosphorothioate group is further conjugated to R.

31. The RNAi agent of claim 1, wherein R is conjugated to Formula I via a linker, and wherein the linker comprises Formula III having connection points C and D: [chemical structure]
wherein Formula I at connection point E is conjugated to Formula III at connection point C and Formula III is conjugated to a phosphate group or a phosphorothioate group at connection point D, and the phosphate group or the phosphorothioate group is further conjugated to R.

32. A pharmaceutical composition comprising the RNAi agent of claim 1, and one or more pharmaceutically acceptable excipients.

33.-41. (canceled)

42. A method of treating a disease or disorder associated with ASCVD in a patient in need thereof, comprising administering to the patient the RNAi agent of claim 1, or a pharmaceutical composition thereof.

43. The method of claim 42, wherein the disease or disorder is dyslipidemia, primary dysbetalipoproteinemia, hypertriglyceridemia, or atherosclerosis.

44. The method of claim 42, wherein the disease or disorder is dyslipidemia.

45. The method of claim 44, wherein the dyslipidemia is hypercholesterolemia.

46. A method of decreasing HMGCR expression in a cell, comprising contacting the cell with the RNAi agent of claim 1.

47. The method of claim 46, wherein the method further comprises incubating the cell for a time sufficient for decreasing the level of HMGCR mRNA by at least 50% as compared to an untreated or control treated cell.

The application's sequence listing, which the Patent Office published only in electronic form, follows.

SEQUENCE LISTING (2317 sequences)

SEQ ID NO: 1 - DNA, 4530 bp, Homo sapiens
  source 1..4530: mol_type = genomic DNA
ccttccgctccgcgactgcgttaactggagccaggctgagcgtcggcgccggggttcggtggcctctagtgagatctggaggatccaaggattctgtagctacaatgttgtcaagactttttcgaatgcatggcctctttgtggcctcccatccctgggaagtcatagtggggacagtgacactgaccatctgcatgatgtccatgaacatgtttactggtaacaataagatctgtggttggaattatgaatgtccaaagtttgaagaggatgttttgagcagtgacattataattctgacaataacacgatgcatagccatcctgtatatttacttccagttccagaatttacgtcaacttggatcaaaatatattttgggtattgctggccttttcacaattttctcaagttttgtattcagtacagttgtcattcacttcttagacaaagaattgacaggcttgaatgaagctttgccctttttcctacttttgattgacctttccagagcaagcacattagcaaagtttgccctcagttccaactcacaggatgaagtaagggaaaatattgctcgtggaatggcaattttaggtcctacgtttaccctcgatgctcttgttgaatgtcttgtgattggagttggtaccatgtcaggggtacgtcagcttgaaattatgtgctgctttggctgcatgtcagttcttgccaactacttcgtgttcatgactttcttcccagcttgtgtgtccttggtattagagctttctcgggaaagccgcgagggtcgtccaatttggcagctcagccattttgcccgagttttagaagaagaagaaaataagccgaatcctgtaactcagagggtcaagatgattatgtctctaggcttggttcttgttcatgctcacagtcgctggatagctgatccttctcctcaaaacagtacagcagatacttctaaggtttcattaggactggatgaaaatgtgtccaagagaattgaaccaagtgtttccctctggcagttttatctctctaaaatgatcagcatggatattgaacaagttattaccctaagtttagctctccttctggctgtcaagtacatcttctttgaacaaacagagacagaatctacactctcattaaaaaaccctatcacatctcctgtagtgacacaaaagaaagtcccagacaattgttgtagacgtgaacctatgctggtcagaaataaccagaaatgtgattcagtagaggaagagacagggataaaccgagaaagaaaagttgaggttataaaacccttagtggctgaaacagataccccaaacagagctacatttgtggttggtaactcctccttactcgatacttcatcagtactggtgacacaggaacctgaaattgaacttcccagggaacctcggcctaatgaagaatgtctacagatacttgggaatgcagagaaaggtgcaaaattccttagtgatgctgagatcatccagttagtcaatgctaagcatatcccagcctacaagttggaaactctgatggaaactcatgagcgtggtgtatctattcgccgacagttactttccaagaagctttcagaaccttcttctctccagtacctaccttacagggattataattactccttggtgatgggagcttgttgtgagaatgttattggatatatgcccatccctgttggagtggcaggacccctttgcttagatgaaaaagaatttcaggttccaatggcaacaacagaaggttgtcttgtggccagcaccaatagaggctgcagagcaataggtcttggtggaggtgccagcagccgagtccttgcagatgggatgactcgtggcccagttgtgcgtcttccacgtgcttgtgactctgcagaagtgaaagcctggctcgaaacatctgaagggttcgcagtgataaaggaggcatttgacagcactagcagatttgcacgtctacagaaacttcatacaagtatagctggacgcaacctttatatccgtttccagtccaggtcaggggatgccatggggatgaacatgatttcaaagggtacagagaaagcactttcaaaacttcacgagtatttccctgaaatgcagattctagccgttagtggtaactattgtactgacaagaaacctgctgctataaattggatagagggaagaggaaaatctgttgtttgtgaagctgtcattccagccaaggttgtcagagaagtattaaagactaccacagaggctatgattgaggtcaacattaacaagaatttagtgggctctgccatggctgggagcataggaggctacaacgcccatgcagcaaacattgtcaccgccatctacattgcctgtggacaggatgcagcacagaatgttggtagttcaaactgtattactttaatggaagcaagtggtcccacaaatgaagatttatatatcagctgcaccatgccatctatagagataggaacggtgggtggtgggaccaacctactacctcagcaagcctgtttgcagatgctaggtgttcaaggagcatgcaaagataatcctggggaaaatgcccggcagcttgcccgaattgtgtgtgggaccgtaatggctggggaattgtcacttatggcagcattggcagcaggacatcttgtcaaaagtcacatgattcacaacaggtcgaagatcaatttacaagacctccaaggagcttgcaccaagaagacagcctgaatagcccgacagttctgaactggaacatgggcattgggttctaaaggactaacataaaatctgtgaattaaaaaagctcaatgcattgtcttgtggaggatgaatagatgtgatcactgagacagccacttggtttttggctctttcagagaggtctcaggttctttccatgcagactcctcagatctgaacacagtttagtgctttacatgctgtgctctttgaagagatttcaacaagaatattgtatgttaaagcatcagagatggtaatctacagctcacctctgaaggcaaatataagctgggaaaaaagttttgatgaaattcttgaagttcatggtgatcagtgcaattgaccttctccctcactcctgccagttgaaaatggatttttaaattatactgtagctgatgaaactcctgattttgtagttaatttattaagtctgggatgtagaacttcaagaagtaagagctaagttctaagttcatgtttgtaaattaatacttcatttggtgctggtctattttgattttggggggtaatcagcattattcttcagaaggggacctgttttcttcaagggaagaaacactcttattcccaaactacagaataatgtgttaaacatgctaaatagttctatcaggaaaacaaatcactgtatttatctccgcaggctatttgttcagagaggccttttgtttaaatataaatgtttaaatataaatgtttgtctggattggctataacatgtctttcagcattaggcttttaagaaacacagggttttgtattctttactaaagatatcagagctcttaatgttgcttagatgagggtgactgtcaagtacaagcaagactgggaccttagaaatcattgtagaaacacagttttgaaagaaaaataccatgtctctaagccaactttaattgcttaaaagacatttttatttagttgaaaaatctagttttttttgtaaactgtatcaaatctgtatatgttgtaataaaacttatgctagtttattggaagtgttcaagaaataaaaatcaacttgtgtactgataaaatactctagcctgggccagagaagataatgttctttaatgttgtccaggaaaccctggcttgcttgccgagcctaatgaaagggaaagtcagctttcagagccagtgaaggagccacgtgaatggccctagaactgtgcctagttcctgtggccaggaggttggtgactgaaacattcacacagggctctttgatggacccacgaacgctcttagctttctcagggggtcagcagagttattgaatcttaattttttttaatgtacaagttttgtataaataataaagaactccttattttgtattacatctaatgcttcaagtgttgctcttggaaagctgatgatgtctcttgtagaagatggactctgaaaaacattccaggaaaccatggcagcatggagagcctcttagtgattgtgtctgcattgttattgtggaagatttaccttttctgttgtacgtaaagcttaaattgcttttgttgtgactttttagccagtgactttttctgagcttttcatggaagtggcagtgaaaaatatgttgagtgttcattttagtgactgtaattaatatcttgctggattaatgttttgtacaattactaaattgtatacattttgttatagaatacttttttctagtttcagtaaataatgaaaaggaagttaataccaa

SEQ ID NO: 2 - RNA, 18 nt, synthetic construct
  source 1..18: mol_type = other RNA
agtcttgacaacattgta

SEQ ID NO: 3 - RNA, 18 nt, synthetic construct
  source 1..18: mol_type = other RNA
aagtcttgacaacattgt

SEQ ID NO: 4 - RNA, 18 nt, synthetic construct
  source 1..18: mol_type = other RNA
aacatgttcatggacatc

SEQ ID NO: 5 - RNA, 18 nt, synthetic construct
  source 1..18: mol_type = other RNA
ctggaactggaagtaaat

SEQ ID NO: 6 - RNA, 18 nt, synthetic construct
  source 1..18: mol_type = other RNA
ttctggaactggaagtaa

SEQ ID NO: 7 - RNA, 18 nt, synthetic construct
  source 1..18: mol_type = other RNA
aaaaagggcaaagcttca

SEQ ID NO: 8 - RNA, 18 nt, synthetic construct
  source 1..18: mol_type = other RNA
gggcaaactttgctaatg

SEQ ID NO: 9 - RNA, 18 nt, synthetic construct
  source 1..18: mol_type = other RNA
agggcaaactttgctaat

SEQ ID NO: 10 - RNA, 18 nt, synthetic construct
  source 1..18: mol_type = other RNA
gagggcaaactttgctaa

SEQ ID NO: 11 - RNA, 18 nt, synthetic construct
  source 1..18: mol_type = other RNA
actgagggcaaactttgc

SEQ ID NO: 12 - RNA, 18 nt, synthetic construct
  source 1..18: mol_type = other RNA
gaactgagggcaaacttt

SEQ ID NO: 13 - RNA, 18 nt, synthetic construct
  source 1..18: mol_type = other RNA
ccttacttcatcctgtga

SEQ ID NO: 14 - RNA, 18 nt, synthetic construct
  source 1..18: mol_type = other RNA
ttcccttacttcatcctg

SEQ ID NO: 15 - RNA, 18 nt, synthetic construct
  source 1..18: mol_type = other RNA
ttttcccttacttcatcc

SEQ ID NO: 16 - RNA, 18 nt, synthetic construct
  source 1..18: mol_type = other RNA
attttcccttacttcatc

SEQ ID NO: 17 - RNA, 18 nt, synthetic construct
  source 1..18: mol_type = other RNA
ccaaattggacgaccctc

SEQ ID NO: 18 - RNA, 18 nt, synthetic construct
  source 1..18: mol_type = other RNA
gccaaattggacgaccct

SEQ ID NO: 19 - RNA, 18 nt, synthetic construct
  source 1..18: mol_type = other RNA
tgccaaattggacgaccc

SEQ ID NO: 20 - RNA, 18 nt, synthetic construct
  source 1..18: mol_type = other RNA
gagctgccaaattggacg

SEQ ID NO: 21 - RNA, 18 nt, synthetic construct
  source 1..18: mol_type = other RNA
tgagctgccaaattggac

SEQ ID NO: 22 - RNA, 18 nt, synthetic construct
  source 1..18: mol_type = other RNA
ctgagctgccaaattgga

SEQ ID NO: 23 - RNA, 18 nt, synthetic construct
  source 1..18: mol_type = other RNA
ggctgagctgccaaattg

SEQ ID NO: 24 - RNA, 18 nt, synthetic construct
  source 1..18: mol_type = other RNA
aatggctgagctgccaaa

SEQ ID NO: 25 - RNA, 18 nt, synthetic construct
  source 1..18: mol_type = other RNA
caaaatggctgagctgcc

SEQ ID NO: 26 - RNA, 18 nt, synthetic construct
  source 1..18: mol_type = other RNA
gcaaaatggctgagctgc

SEQ ID NO: 27 - RNA, 18 nt, synthetic construct
  source 1..18: mol_type = other RNA
cttcttcttctaaaactc

SEQ ID NO: 28 - RNA, 18 nt, synthetic construct
  source 1..18: mol_type = other RNA
cataatcatcttgaccct

SEQ ID NO: 29 - RNA, 18 nt, synthetic construct
  source 1..18: mol_type = other RNA
agacataatcatcttgac

SEQ ID NO: 30 - RNA, 18 nt, synthetic construct
  source 1..18: mol_type = other RNA
ggatcagctatccagcga

SEQ ID NO: 31 - RNA, 18 nt, synthetic construct
  source 1..18: mol_type = other RNA
aggatcagctatccagcg

SEQ ID NO: 32 - RNA, 18 nt, synthetic construct
  source 1..18: mol_type = other RNA
aaggatcagctatccagc

SEQ ID NO: 33 - RNA, 18 nt, synthetic construct
  source 1..18: mol_type = other RNA
gttttataacctcaactt

SEQ ID NO: 34 - RNA, 18 nt, synthetic construct
  source 1..18: mol_type = other RNA
ggttttataacctcaact

SEQ ID NO: 35 - RNA, 18 nt, synthetic construct
  source 1..18: mol_type = other RNA
cagggatgggcatatatc

SEQ ID NO: 36 - RNA, 18 nt, synthetic construct
  source 1..18: mol_type = other RNA
acagggatgggcatatat

SEQ ID NO: 37 - RNA, 18 nt, synthetic construct
  source 1..18: mol_type = other RNA
caacagggatgggcatat

SEQ ID NO: 38 - RNA, 18 nt, synthetic construct
  source 1..18: mol_type = other RNA
ccaacagggatgggcata

SEQ ID NO: 39 - RNA, 18 nt, synthetic construct
  source 1..18: mol_type = other RNA
tccaacagggatgggcat

SEQ ID NO: 40 - RNA, 18 nt, synthetic construct
  source 1..18: mol_type = other RNA
ctccaacagggatgggca

SEQ ID NO: 41 - RNA, 18 nt, synthetic construct
  source 1..18: mol_type = other RNA
cggctgctggcacctcca

SEQ ID NO: 42 - RNA, 18 nt, synthetic construct
  source 1..18: mol_type = other RNA
gtcatcccatctgcaagg

SEQ ID NO: 43 - RNA, 18 nt, synthetic construct
  source 1..18: mol_type = other RNA
agtcatcccatctgcaag

SEQ ID NO: 44 - RNA, 18 nt, synthetic construct
  source 1..18: mol_type = other RNA
cgagtcatcccatctgca

SEQ ID NO: 45 - RNA, 18 nt, synthetic construct
  source 1..18: mol_type = other RNA
acaagcacgtggaagacg

SEQ ID NO: 46 - RNA, 18 nt, synthetic construct
  source 1..18: mol_type = other RNA
cacaagcacgtggaagac

SEQ ID NO: 47 - RNA, 18 nt, synthetic construct
  source 1..18: mol_type = other RNA
gtcacaagcacgtggaag

SEQ ID NO: 48 - RNA, 18 nt, synthetic construct
  source 1..18: mol_type = other RNA
tgcagagtcacaagcacg

SEQ ID NO: 49 - RNA, 18 nt, synthetic construct
  source 1..18: mol_type = other RNA
cttctgcagagtcacaag

SEQ ID NO: 50 - RNA, 18 nt, synthetic construct
  source 1..18: mol_type = other RNA
ggactggaaacggatata

SEQ ID NO: 51 - RNA, 18 nt, synthetic construct
  source 1..18: mol_type = other RNA
tggactggaaacggatat

SEQ ID NO: 52 - RNA, 18 nt, synthetic construct
  source 1..18: mol_type = other RNA
cctggactggaaacggat

SEQ ID NO: 53 - RNA, 18 nt, synthetic construct
  source 1..18: mol_type = other RNA
tatgctcccagccatggc

SEQ ID NO: 54 - RNA, 18 nt, synthetic construct
  source 1..18: mol_type = other RNA
ctatgctcccagccatgg

SEQ ID NO: 55 - RNA, 18 nt, synthetic construct
  source 1..18: mol_type = other RNA
cctatgctcccagccatg

SEQ ID NO: 56 - RNA, 18 nt, synthetic construct
  source 1..18: mol_type = other RNA
cattctgtgctgcatcct

SEQ ID NO: 57 - RNA, 18 nt, synthetic construct
  source 1..18: mol_type = other RNA
agtaatacagtttgaact

SEQ ID NO: 58 - RNA, 18 nt, synthetic construct
  source 1..18: mol_type = other RNA
taaagtaatacagtttga

SEQ ID NO: 59 - RNA, 18 nt, synthetic construct
  source 1..18: mol_type = other RNA
ttaaagtaatacagtttg

SEQ ID NO: 60 - RNA, 18 nt, synthetic construct
  source 1..18: mol_type = other RNA
attaaagtaatacagttt

SEQ ID NO: 61 - RNA, 18 nt, synthetic construct
  source 1..18: mol_type = other RNA
tccattaaagtaatacag

SEQ ID NO: 62 - RNA, 18 nt, synthetic construct
  source 1..18: mol_type = other RNA
ttccattaaagtaataca

SEQ ID NO: 63 - RNA, 18 nt, synthetic construct
  source 1..18: mol_type = other RNA
cttccattaaagtaatac

SEQ ID NO: 64 - RNA, 18 nt, synthetic construct
  source 1..18: mol_type = other RNA
gcttccattaaagtaata

SEQ ID NO: 65 - RNA, 18 nt, synthetic construct
  source 1..18: mol_type = other RNA
atggtgcagctgatatat

SEQ ID NO: 66 - RNA, 18 nt, synthetic construct
  source 1..18: mol_type = other RNA
catggtgcagctgatata

SEQ ID NO: 67 - RNA, 18 nt, synthetic construct
  source 1..18: mol_type = other RNA
gcatggtgcagctgatat

SEQ ID NO: 68 - RNA, 18 nt, synthetic construct
  source 1..18: mol_type = other RNA
ggcatggtgcagctgata

SEQ ID NO: 69 - RNA, 18 nt, synthetic construct
  source 1..18: mol_type = other RNA
tggcatggtgcagctgat

SEQ ID NO: 70 - RNA, 18 nt, synthetic construct
  source 1..18: mol_type = other RNA
gatggcatggtgcagctg

SEQ ID NO: 71 - RNA, 18 nt, synthetic construct
  source 1..18: mol_type = other RNA
gaacacctagcatctgca

SEQ ID NO: 72 - RNA, 18 nt, synthetic construct
  source 1..18: mol_type = other RNA
ttgaacacctagcatctg

SEQ ID NO: 73 - RNA, 18 nt, synthetic construct
  source 1..18: mol_type = other RNA
cttgaacacctagcatct

SEQ ID NO: 74 - RNA, 18 nt, synthetic construct
  source 1..18: mol_type = other RNA
ccttgaacacctagcatc

SEQ ID NO: 75 - RNA, 18 nt, synthetic construct
  source 1..18: mol_type = other RNA
tccttgaacacctagcat

SEQ ID NO: 76 - RNA, 18 nt, synthetic construct
  source 1..18: mol_type = other RNA
atgctccttgaacaccta

SEQ ID NO: 77 - RNA, 18 nt, synthetic construct
  source 1..18: mol_type = other RNA
gcatgctccttgaacacc

SEQ ID NO: 78 - RNA, 18 nt, synthetic construct
  source 1..18: mol_type = other RNA
tgcatgctccttgaacac

SEQ ID NO: 79 - RNA, 18 nt, synthetic construct
  source 1..18: mol_type = other RNA
ttgcatgctccttgaaca

SEQ ID NO: 80 - RNA, 18 nt, synthetic construct
  source 1..18: mol_type = other RNA
ctttgcatgctccttgaa

SEQ ID NO: 81 - RNA, 18 nt, synthetic construct
  source 1..18: mol_type = other RNA
tctttgcatgctccttga

SEQ ID NO: 82 - RNA, 18 nt, synthetic construct
  source 1..18: mol_type = other RNA
aattcgggcaagctgccg

SEQ ID NO: 83 - RNA, 18 nt, synthetic construct
  source 1..18: mol_type = other RNA
acaattcgggcaagctgc

SEQ ID NO: 84 - RNA, 18 nt, synthetic construct
  source 1..18: mol_type = other RNA
aagatgtcctgctgccaa

SEQ ID NO: 85 - RNA, 18 nt, synthetic construct
  source 1..18: mol_type = other RNA
caagatgtcctgctgcca

SEQ ID NO: 86 - RNA, 18 nt, synthetic construct
  source 1..18: mol_type = other RNA
gacaagatgtcctgctgc

SEQ ID NO: 87 - RNA, 18 nt, synthetic construct
  source 1..18: mol_type = other RNA
aaggcctctctgaacaaa

SEQ ID NO: 88 - RNA, 18 nt, synthetic construct
  source 1..18: mol_type = other RNA
agctctgatatctttagt

SEQ ID NO: 89 - RNA, 18 nt, synthetic construct
  source 1..18: mol_type = other RNA
ttacaacatatacagatt

SEQ ID NO: 90 - RNA, 18 nt, synthetic construct
  source 1..18: mol_type = other RNA
attacaacatatacagat

SEQ ID NO: 91 - RNA, 18 nt, synthetic construct
  source 1..18: mol_type = other RNA
ctagagtattttatcagt

SEQ ID NO: 92 - RNA, 18 nt, synthetic construct
  source 1..18: mol_type = other RNA
agccagggtttcctggac

SEQ ID NO: 93 - RNA, 18 nt, synthetic construct
  source 1..18: mol_type = other RNA
gcaagccagggtttcctg

SEQ ID NO: 94 - RNA, 18 nt, synthetic construct
  source 1..18: mol_type = other RNA
tcagagtccatcttctac

SEQ ID NO: 95 - RNA, 18 nt, synthetic construct
  source 1..18: mol_type = other RNA
ttcagagtccatcttcta

SEQ ID NO: 96 - RNA, 18 nt, synthetic construct
  source 1..18: mol_type = other RNA
agtaattgtacaaaacat

SEQ ID NO: 97 - RNA, 18 nt, synthetic construct
  source 1..18: mol_type = other RNA
attctataacaaaatgta

SEQ ID NO: 98 - RNA, 18 nt, synthetic construct
  source 1..18: mol_type = other RNA
gtattctataacaaaatg

SEQ ID NO: 99 - RNA, 18 nt, synthetic construct
  source 1..18: mol_type = other RNA
agtattctataacaaaat

SEQ ID NO: 100 - RNA, 18 nt, synthetic construct
  source 1..18: mol_type = other RNA
aaaaagtcttgacaacat

SEQ ID NO: 101 - RNA, 18 nt, synthetic construct
  source 1..18: mol_type = other RNA
gaaaaagtcttgacaaca

SEQ ID NO: 102 - RNA, 18 nt, synthetic construct
  source 1..18: mol_type = other RNA
cgaaaaagtcttgacaac

SEQ ID NO: 103 - RNA, 18 nt, synthetic construct
  source 1..18: mol_type = other RNA
gttcatggacatcatgca

SEQ ID NO: 104 - RNA, 18 nt, synthetic construct
  source 1..18: mol_type = other RNA
tgttcatggacatcatgc

SEQ ID NO: 105 - RNA, 18 nt, synthetic construct
  source 1..18: mol_type = other RNA
aattccaaccacagatct

SEQ ID NO: 106 - RNA, 18 nt, synthetic construct
  source 1..18: mol_type = other RNA
taattccaaccacagatc

SEQ ID NO: 107 - RNA, 18 nt, synthetic construct
  source 1..18: mol_type = other RNA
ataattccaaccacagat

SEQ ID NO: 108 - RNA, 18 nt, synthetic construct
  source 1..18: mol_type = other RNA
gaactggaagtaaatata

SEQ ID NO: 109 - RNA, 18 nt, synthetic construct
  source 1..18: mol_type = other RNA
ggaactggaagtaaatat

SEQ ID NO: 110 - RNA, 18 nt, synthetic construct
  source 1..18: mol_type = other RNA
tggaactggaagtaaata

SEQ ID NO: 111 - RNA, 18 nt, synthetic construct
  source 1..18: mol_type = other RNA
attctggaactggaagta

SEQ ID NO: 112 - RNA, 18 nt, synthetic construct
  source 1..18: mol_type = other RNA
ggccagcaatacccaaaa

SEQ ID NO: 113 - RNA, 18 nt, synthetic construct
  source 1..18: mol_type = other RNA
aatgacaactgtactgaa

SEQ ID NO: 114 - RNA, 18 nt, synthetic construct
  source 1..18: mol_type = other RNA
gaatgacaactgtactga

SEQ ID NO: 115 - RNA, 18 nt, synthetic construct
  source 1..18: mol_type = other RNA
agcctgtcaattctttgt

SEQ ID NO: 116 - RNA, 18 nt, synthetic construct
  source 1..18: mol_type = other RNA
aagcctgtcaattctttg

SEQ ID NO: 117 - RNA, 18 nt, synthetic construct
  source 1..18: mol_type = other RNA
gggcaaagcttcattcaa

SEQ ID NO: 118 - RNA, 18 nt, synthetic construct
  source 1..18: mol_type = other RNA
agggcaaagcttcattca

SEQ ID NO: 119 - RNA, 18 nt, synthetic construct
  source 1..18: mol_type = other RNA
aagggcaaagcttcattc

SEQ ID NO: 120 - RNA, 18 nt, synthetic construct
  source 1..18: mol_type = other RNA
gaaaaagggcaaagcttc

SEQ ID NO: 121 - RNA, 18 nt, synthetic construct
  source 1..18: mol_type = other RNA
ggaactgagggcaaactt

SEQ ID NO: 122 - RNA, 18 nt, synthetic construct
  source 1..18: mol_type = other RNA
ttggaactgagggcaaac

SEQ ID NO: 123 - RNA, 18 nt, synthetic construct
  source 1..18: mol_type = other RNA
ttacttcatcctgtgagt

SEQ ID NO: 124 - RNA, 18 nt, synthetic construct
  source 1..18: mol_type = other RNA
cttacttcatcctgtgag

SEQ ID NO: 125 - RNA, 18 nt, synthetic construct
  source 1..18: mol_type = other RNA
gcaatattttcccttact

SEQ ID NO: 126 - RNA, 18 nt, synthetic construct
  source 1..18: mol_type = other RNA
agcaatattttcccttac

SEQ ID NO: 127 - RNA, 18 nt, synthetic construct
  source 1..18: mol_type = other RNA
cgagcaatattttccctt

SEQ ID NO: 128 - RNA, 18 nt, synthetic construct
  source 1..18: mol_type = other RNA
cacgagcaatattttccc

SEQ ID NO: 129 - RNA, 18 nt, synthetic construct
  source 1..18: mol_type = other RNA
ccacgagcaatattttcc

SEQ ID NO: 130 - RNA, 18 nt, synthetic construct
  source 1..18: mol_type = other RNA
tccacgagcaatattttc

SEQ ID NO: 131 - RNA, 18 nt, synthetic construct
  source 1..18: mol_type = other RNA
ttccacgagcaatatttt

SEQ ID NO: 132 - RNA, 18 nt, synthetic construct
  source 1..18: mol_type = other RNA
ccattccacgagcaatat

SEQ ID NO: 133 - RNA, 18 nt, synthetic construct
  source 1..18: mol_type = other RNA
gccattccacgagcaata

SEQ ID NO: 134 - RNA, 18 nt, synthetic construct
  source 1..18: mol_type = other RNA
tgccattccacgagcaat

SEQ ID NO: 135 - RNA, 18 nt, synthetic construct
  source 1..18: mol_type = other RNA
ttgccattccacgagcaa

SEQ ID NO: 136 - RNA, 18 nt, synthetic construct
  source 1..18: mol_type = other RNA
attgccattccacgagca

SEQ ID NO: 137 - RNA, 18 nt, synthetic construct
  source 1..18: mol_type = other RNA
aattgccattccacgagc

SEQ ID NO: 138 - RNA, 18 nt, synthetic construct
  source 1..18: mol_type = other RNA
tccaatcacaagacattc

SEQ ID NO: 139 - RNA, 18 nt, synthetic construct
  source 1..18: mol_type = other RNA
ctccaatcacaagacatt

SEQ ID NO: 140 - RNA, 18 nt, synthetic construct
  source 1..18: mol_type = other RNA
taccaactccaatcacaa

SEQ ID NO: 141 - RNA, 18 nt, synthetic construct
  source 1..18: mol_type = other RNA
gtaccaactccaatcaca

SEQ ID NO: 142 - RNA, 18 nt, synthetic construct
  source 1..18: mol_type = other RNA
ggtaccaactccaatcac

SEQ ID NO: 143 - RNA, 18 nt, synthetic construct
  source 1..18: mol_type = other RNA
atggtaccaactccaatc

SEQ ID NO: 144 - RNA, 18 nt, synthetic construct
  source 1..18: mol_type = other RNA
acatggtaccaactccaa

SEQ ID NO: 145 - RNA, 18 nt, synthetic construct
  source 1..18: mol_type = other RNA
gacatggtaccaactcca

SEQ ID NO: 146 - RNA, 18 nt, synthetic construct
  source 1..18: mol_type = other RNA
ctgacatggtaccaactc

SEQ ID NO: 147 - RNA, 18 nt, synthetic construct
  source 1..18: mol_type = other RNA
cctgacatggtaccaact

SEQ ID NO: 148 - RNA, 18 nt, synthetic construct
  source 1..18: mol_type = other RNA
tgcagccaaagcagcaca

SEQ ID NO: 149 - RNA, 18 nt, synthetic construct
  source 1..18: mol_type = other RNA
gaacacgaagtagttggc

SEQ ID NO: 150 - RNA, 18 nt, synthetic construct
  source 1..18: mol_type = other RNA
tgaacacgaagtagttgg

SEQ ID NO: 151 - RNA, 18 nt, synthetic construct
  source 1..18: mol_type = other RNA
atgaacacgaagtagttg

SEQ ID NO: 152 - RNA, 18 nt, synthetic construct
  source 1..18: mol_type = other RNA
catgaacacgaagtagtt

SEQ ID NO: 153 - RNA, 18 nt, synthetic construct
  source 1..18: mol_type = other RNA
gtcatgaacacgaagtag

SEQ ID NO: 154 - RNA, 18 nt, synthetic construct
  source 1..18: mol_type = other RNA
tttcccgagaaagctcta

SEQ ID NO: 155 - RNA, 18 nt, synthetic construct
  source 1..18: mol_type = other RNA
ctttcccgagaaagctct

SEQ ID NO: 156 - RNA, 18 nt, synthetic construct
  source 1..18: mol_type = other RNA
gctttcccgagaaagctc

SEQ ID NO: 157 - RNA, 18 nt, synthetic construct
  source 1..18: mol_type = other RNA
cggctttcccgagaaagc

SEQ ID NO: 158 - RNA, 18 nt, synthetic construct
  source 1..18: mol_type = other RNA
acgaccctcgcggctttc

SEQ ID NO: 159 - RNA, 18 nt, synthetic construct
  source 1..18: mol_type = other RNA
gacgaccctcgcggcttt

SEQ ID NO: 160 - RNA, 18 nt, synthetic construct
  source 1..18: mol_type = other RNA
ggacgaccctcgcggctt

SEQ ID NO: 161 - RNA, 18 nt, synthetic construct
  source 1..18: mol_type = other RNA
tggacgaccctcgcggct

SEQ ID NO: 162 - RNA, 18 nt, synthetic construct
  source 1..18: mol_type = other RNA
ttggacgaccctcgcggc

SEQ ID NO: 163 - RNA, 18 nt, synthetic construct
  source 1..18: mol_type = other RNA
attggacgaccctcgcgg

SEQ ID NO: 164 - RNA, 18 nt, synthetic construct
  source 1..18: mol_type = other RNA
aattggacgaccctcgcg

SEQ ID NO: 165 - RNA, 18 nt, synthetic construct
  source 1..18: mol_type = other RNA
aaattggacgaccctcgc

SEQ ID NO: 166 - RNA, 18 nt, synthetic construct
  source 1..18: mol_type = other RNA
caaattggacgaccctcg

SEQ ID NO: 167 - RNA, 18 nt, synthetic construct
  source 1..18: mol_type = other RNA
ttcttcttctaaaactcg

SEQ ID NO: 168 - RNA, 18 nt, synthetic construct
  source 1..18: mol_type = other RNA
aatcatcttgaccctctg

SEQ ID NO: 169 - RNA, 18 nt, synthetic construct
  source 1..18: mol_type = other RNA
gagacataatcatcttga

SEQ ID NO: 170 - RNA, 18 nt, synthetic construct
  source 1..18: mol_type = other RNA
agagacataatcatcttg

SEQ ID NO: 171 - RNA, 18 nt, synthetic construct
  source 1..18: mol_type = other RNA
ctagagacataatcatct

SEQ ID NO: 172 - RNA, 18 nt, synthetic construct
  source 1..18: mol_type = other RNA
cctagagacataatcatc

SEQ ID NO: 173 - RNA, 18 nt, synthetic construct
  source 1..18: mol_type = other RNA
gcctagagacataatcat

SEQ ID NO: 174 - RNA, 18 nt, synthetic construct
  source 1..18: mol_type = other RNA
agcctagagacataatca

SEQ ID NO: 175 - RNA, 18 nt, synthetic construct
  source 1..18: mol_type = other RNA
aagcctagagacataatc

SEQ ID NO: 176 - RNA, 18 nt, synthetic construct
  source 1..18: mol_type = other RNA
caagcctagagacataat

SEQ ID NO: 177 - RNA, 18 nt, synthetic construct
  source 1..18: mol_type = other RNA
tatccagcgactgtgagc

SEQ ID NO: 178 - RNA, 18 nt, synthetic construct
  source 1..18: mol_type = other RNA
ctatccagcgactgtgag

SEQ ID NO: 179 - RNA, 18 nt, synthetic construct
  source 1..18: mol_type = other RNA
gctatccagcgactgtga

SEQ ID NO: 180 - RNA, 18 nt, synthetic construct
  source 1..18: mol_type = other RNA
agctatccagcgactgtg

SEQ ID NO: 181 - RNA, 18 nt, synthetic construct
  source 1..18: mol_type = other RNA
cagctatccagcgactgt

SEQ ID NO: 182 - RNA, 18 nt, synthetic construct
  source 1..18: mol_type = other RNA
tcagctatccagcgactg

SEQ ID NO: 183 - RNA, 18 nt, synthetic construct
  source 1..18: mol_type = other RNA
ggaaacacttggttcaat

SEQ ID NO: 184 - RNA, 18 nt, synthetic construct
  source 1..18: mol_type = other RNA
cagagggaaacacttggt

SEQ ID NO: 185 - RNA, 18 nt, synthetic construct
  source 1..18: mol_type = other RNA
aatatccatgctgatcat

SEQ ID NO: 186 - RNA, 18 nt, synthetic construct
  source 1..18: mol_type = other RNA
tcaatatccatgctgatc

SEQ ID NO: 187 - RNA, 18 nt, synthetic construct
  source 1..18: mol_type = other RNA
acttgacagccagaagga

SEQ ID NO: 188 - RNA, 18 nt, synthetic construct
  source 1..18: mol_type = other RNA
tacttgacagccagaagg

SEQ ID NO: 189 - RNA, 18 nt, synthetic construct
  source 1..18: mol_type = other RNA
gtgtagattctgtctctg

SEQ ID NO: 190 - RNA, 18 nt, synthetic construct
  source 1..18: mol_type = other RNA
agtgtagattctgtctct

SEQ ID NO: 191 - RNA, 18 nt, synthetic construct
  source 1..18: mol_type = other RNA
aggttcacgtctacaaca

SEQ ID NO: 192 - RNA, 18 nt, synthetic construct
  source 1..18: mol_type = other RNA
gggttttataacctcaac

SEQ ID NO: 193 - RNA, 18 nt, synthetic construct
  source 1..18: mol_type = other RNA
aagggttttataacctca

SEQ ID NO: 194 - RNA, 18 nt, synthetic construct
  source 1..18: mol_type = other RNA
taagggttttataacctc

SEQ ID NO: 195 - RNA, 18 nt, synthetic construct
  source 1..18: mol_type = other RNA
ctaagggttttataacct

SEQ ID NO: 196 - RNA, 18 nt, synthetic construct
  source 1..18: mol_type = other RNA
aattttgcacctttctct

SEQ ID NO: 197 - RNA, 18 nt, synthetic construct
  source 1..18: mol_type = other RNA
gaattttgcacctttctc

SEQ ID NO: 198 - RNA, 18 nt, synthetic construct
  source 1..18: mol_type = other RNA
ggaattttgcacctttct

SEQ ID NO: 199 - RNA, 18 nt, synthetic construct
  source 1..18: mol_type = other RNA
aggaattttgcacctttc

SEQ ID NO: 200 - RNA, 18 nt, synthetic construct
  source 1..18: mol_type = other RNA
aaggaattttgcaccttt

SEQ ID NO: 201 - RNA, 18 nt, synthetic construct
  source 1..18: mol_type = other RNA
taaggaattttgcacctt

SEQ ID NO: 202 - RNA, 18 nt, synthetic construct
  source 1..18: mol_type = other RNA
ctaaggaattttgcacct

SEQ ID NO: 203 - RNA, 18 nt, synthetic construct
  source 1..18: mol_type = other RNA
actaaggaattttgcacc

SEQ ID NO: 204 - RNA, 18 nt, synthetic construct
  source 1..18: mol_type = other RNA
cactaaggaattttgcac

SEQ ID NO: 205 - RNA, 18 nt, synthetic construct
  source 1..18: mol_type = other RNA
catcactaaggaattttg

SEQ ID NO: 206 - RNA, 18 nt, synthetic construct
  source 1..18: mol_type = other RNA
gcatcactaaggaatttt

SEQ ID NO: 207 - RNA, 18 nt, synthetic construct
  source 1..18: mol_type = other RNA
ctcagcatcactaaggaa

SEQ ID NO: 208 - RNA, 18 nt, synthetic construct
  source 1..18: mol_type = other RNA
gatctcagcatcactaag

SEQ ID NO: 209 - RNA, 18 nt, synthetic construct
  source 1..18: mol_type = other RNA
tgatctcagcatcactaa

SEQ ID NO: 210 - RNA, 18 nt, synthetic construct
  source 1..18: mol_type = other RNA
gactaactggatgatctc

SEQ ID NO: 211 - RNA, 18 nt, synthetic construct
  source 1..18: mol_type = other RNA
tgactaactggatgatct

SEQ ID NO: 212 - RNA, 18 nt, synthetic construct
  source 1..18: mol_type = other RNA
ttgactaactggatgatc

SEQ ID NO: 213 - RNA, 18 nt, synthetic construct
  source 1..18: mol_type = other RNA
gcattgactaactggatg

SEQ ID NO: 214 - RNA, 18 nt, synthetic construct
  source 1..18: mol_type = other RNA
gggatatgcttagcattg

SEQ ID NO: 215 - RNA, 18 nt, synthetic construct
  source 1..18: mol_type = other RNA
gtaggctgggatatgctt

SEQ ID NO: 216 - RNA, 18 nt, synthetic construct
  source 1..18: mol_type = other RNA
ttgtaggctgggatatgc

SEQ ID NO: 217 - RNA, 18 nt, synthetic construct
  source 1..18: mol_type = other RNA
agtttccatcagagtttc

SEQ ID NO: 218 - RNA, 18 nt, synthetic construct
  source 1..18: mol_type = other RNA
gagtttccatcagagttt

SEQ ID NO: 219 - RNA, 18 nt, synthetic construct
  source 1..18: mol_type = other RNA
tgagtttccatcagagtt

SEQ ID NO: 220 - RNA, 18 nt, synthetic construct
  source 1..18: mol_type = other RNA
atgagtttccatcagagt

SEQ ID NO: 221 - RNA, 18 nt, synthetic construct
  source 1..18: mol_type = other RNA
cacgctcatgagtttcca

SEQ ID NO: 222 - RNA, 18 nt, synthetic construct
  source 1..18: mol_type = other RNA
ccacgctcatgagtttcc

SEQ ID NO: 223 - RNA, 18 nt, synthetic construct
  source 1..18: mol_type = other RNA
accacgctcatgagtttc

SEQ ID NO: 224 - RNA, 18 nt, synthetic construct
  source 1..18: mol_type = other RNA
caccacgctcatgagttt

SEQ ID NO: 225 - RNA, 18 nt, synthetic construct
  source 1..18: mol_type = other RNA
acaccacgctcatgagtt

SEQ ID NO: 226 - RNA, 18 nt, synthetic construct
  source 1..18: mol_type = other RNA
gcgaatagatacaccacg

SEQ ID NO: 227 - RNA, 18 nt, synthetic construct
  source 1..18: mol_type = other RNA
attataatccctgtaagg

SEQ ID NO: 228 - RNA, 18 nt, synthetic construct
  source 1..18: mol_type = other RNA
aattataatccctgtaag

SEQ ID NO: 229 - RNA, 18 nt, synthetic construct
  source 1..18: mol_type = other RNA
caaggagtaattataatc

SEQ ID NO: 230 - RNA, 18 nt, synthetic construct
  source 1..18: mol_type = other RNA
ccaaggagtaattataat

SEQ ID NO: 231 - RNA, 18 nt, synthetic construct
  source 1..18: mol_type = other RNA
accaaggagtaattataa

SEQ ID NO: 232 - RNA, 18 nt, synthetic construct
  source 1..18: mol_type = other RNA
caccaaggagtaattata

SEQ ID NO: 233 - RNA, 18 nt, synthetic construct
  source 1..18: mol_type = other RNA
cccatcaccaaggagtaa

SEQ ID NO: 234 - RNA, 18 nt, synthetic construct
  source 1..18: mol_type = other RNA
tcccatcaccaaggagta

SEQ ID NO: 235 - RNA, 18 nt, synthetic construct
  source 1..18: mol_type = other RNA
acaagctcccatcaccaa

SEQ ID NO: 236 - RNA, 18 nt, synthetic construct
  source 1..18: mol_type = other RNA
acaacaagctcccatcac

SEQ ID NO: 237 - RNA, 18 nt, synthetic construct
  source 1..18: mol_type = other RNA
ggatgggcatatatccaa

SEQ ID NO: 238 - RNA, 18 nt, synthetic construct
  source 1..18: mol_type = other RNA
gggatgggcatatatcca

SEQ ID NO: 239 - RNA, 18 nt, synthetic construct
  source 1..18: mol_type = other RNA
ggccacaagacaaccttc

SEQ ID NO: 240 - RNA, 18 nt, synthetic construct
  source 1..18: mol_type = other RNA
tgctggccacaagacaac

SEQ ID NO: 241 - RNA, 18 nt, synthetic construct
  source 1..18: mol_type = other RNA
tggtgctggccacaagac

SEQ ID NO: 242 - RNA, 18 nt, synthetic construct
  source 1..18: mol_type = other RNA
ttggtgctggccacaaga

SEQ ID NO: 243 - RNA, 18 nt, synthetic construct
  source 1..18: mol_type = other RNA
tggcacctccaccaagac

SEQ ID NO: 244 - RNA, 18 nt, synthetic construct
  source 1..18: mol_type = other RNA
ctggcacctccaccaaga

SEQ ID NO: 245 - RNA, 18 nt, synthetic construct
  source 1..18: mol_type = other RNA
tcggctgctggcacctcc

SEQ ID NO: 246 - RNA, 18 nt, synthetic construct
  source 1..18: mol_type = other RNA
aaggactcggctgctggc

SEQ ID NO: 247 - RNA, 18 nt, synthetic construct
  source 1..18: mol_type = other RNA
ctgcaaggactcggctgc

SEQ ID NO: 248 - RNA, 18 nt, synthetic construct
  source 1..18: mol_type = other RNA
tctgcaaggactcggctg

SEQ ID NO: 249 - RNA, 18 nt, synthetic construct
  source 1..18: mol_type = other RNA
atctgcaaggactcggct

SEQ ID NO: 250 - RNA, 18 nt, synthetic construct
  source 1..18: mol_type = other RNA
catctgcaaggactcggc

SEQ ID NO: 251 - RNA, 18 nt, synthetic construct
  source 1..18: mol_type = other RNA
cccatctgcaaggactcg

SEQ ID NO: 252 - RNA, 18 nt, synthetic construct
  source 1..18: mol_type = other RNA
atcccatctgcaaggact

SEQ ID NO: 253 - RNA, 18 nt, synthetic construct
  source 1..18: mol_type = other RNA
acgagtcatcccatctgc

SEQ ID NO: 254 - RNA, 18 nt, synthetic construct
  source 1..18: mol_type = other RNA
cacgagtcatcccatctg

SEQ ID NO: 255 - RNA, 18 nt, synthetic construct
  source 1..18: mol_type = other RNA
ccacgagtcatcccatct

SEQ ID NO: 256 - RNA, 18 nt, synthetic construct
  source 1..18: mol_type = other RNA
gccacgagtcatcccatc

SEQ ID NO: 257 - RNA, 18 nt, synthetic construct
  source 1..18: mol_type = other RNA
ggccacgagtcatcccat

SEQ ID NO: 258 - RNA, 18 nt, synthetic construct
  source 1..18: mol_type = other RNA
gggccacgagtcatccca

SEQ ID NO: 259 - RNA, 18 nt, synthetic construct
  source 1..18: mol_type = other RNA
tgggccacgagtcatccc

SEQ ID NO: 260 - RNA, 18 nt, synthetic construct
  source 1..18: mol_type = other RNA
ctgggccacgagtcatcc

SEQ ID NO: 261 - RNA, 18 nt, synthetic construct
  source 1..18: mol_type = other RNA
actgggccacgagtcatc

SEQ ID NO: 262 - RNA, 18 nt, synthetic construct
  source 1..18: mol_type = other RNA
aagacgcacaactgggcc

SEQ ID NO: 263 - RNA, 18 nt, synthetic construct
  source 1..18: mol_type = other RNA
gaagacgcacaactgggc

SEQ ID NO: 264 - RNA, 18 nt, synthetic construct
  source 1..18: mol_type = other RNA
tggaagacgcacaactgg

SEQ ID NO: 265 - RNA, 18 nt, synthetic construct
  source 1..18: mol_type = other RNA
gtggaagacgcacaactg

SEQ ID NO: 266 - RNA, 18 nt, synthetic construct
  source 1..18: mol_type = other RNA
cgtggaagacgcacaact

SEQ ID NO: 267 - RNA, 18 nt, synthetic construct
  source 1..18: mol_type = other RNA
acgtggaagacgcacaac

SEQ ID NO: 268 - RNA, 18 nt, synthetic construct
  source 1..18: mol_type = other RNA
cacgtggaagacgcacaa

SEQ ID NO: 269 - RNA, 18 nt, synthetic construct
  source 1..18: mol_type = other RNA
tcacttctgcagagtcac

SEQ ID NO: 270 - RNA, 18 nt, synthetic construct
  source 1..18: mol_type = other RNA
tatcactgcgaacccttc

SEQ ID NO: 271 - RNA, 18 nt, synthetic construct
  source 1..18: mol_type = other RNA
ttatcactgcgaaccctt

SEQ ID NO: 272 - RNA, 18 nt, synthetic construct
  source 1..18: mol_type = other RNA
tttatcactgcgaaccct

SEQ ID NO: 273 - RNA, 18 nt, synthetic construct
  source 1..18: mol_type = other RNA
cctttatcactgcgaacc

SEQ ID NO: 274 - RNA, 18 nt, synthetic construct
  source 1..18: mol_type = other RNA
tcctttatcactgcgaac

SEQ ID NO: 275 - RNA, 18 nt, synthetic construct
  source 1..18: mol_type = other RNA
gcctcctttatcactgcg

SEQ ID NO: 276 - RNA, 18 nt, synthetic construct
  source 1..18: mol_type = other RNA
aaatgcctcctttatcac

SEQ ID NO: 277 - RNA, 18 nt, synthetic construct
  source 1..18: mol_type = other RNA
tagacgtgcaaatctgct

SEQ ID NO: 278 - RNA, 18 nt, synthetic construct
  source 1..18: mol_type = other RNA
gtagacgtgcaaatctgc

SEQ ID NO: 279 - RNA, 18 nt, synthetic construct
  source 1..18: mol_type = other RNA
tgtagacgtgcaaatctg

SEQ ID NO: 280 - RNA, 18 nt, synthetic construct
  source 1..18: mol_type = other RNA
ctgtagacgtgcaaatct

SEQ ID NO: 281 - RNA, 18 nt, synthetic construct
  source 1..18: mol_type = other RNA
tctgtagacgtgcaaatc

SEQ ID NO: 282 - RNA, 18 nt, synthetic construct
  source 1..18: mol_type = other RNA
tttctgtagacgtgcaaa

SEQ ID NO: 283 - RNA, 18 nt, synthetic construct
  source 1..18: mol_type = other RNA
gtttctgtagacgtgcaa

SEQ ID NO: 284 - RNA, 18 nt, synthetic construct
  source 1..18: mol_type = other RNA
gatataaaggttgcgtcc

SEQ ID NO: 285 - RNA, 18 nt, synthetic construct
  source 1..18: mol_type = other RNA
ggatataaaggttgcgtc

SEQ ID NO: 286 - RNA, 18 nt, synthetic construct
  source 1..18: mol_type = other RNA
cggatataaaggttgcgt

SEQ ID NO: 287 - RNA, 18 nt, synthetic construct
  source 1..18: mol_type = other RNA
acggatataaaggttgcg

SEQ ID NO: 288 - RNA, 18 nt, synthetic construct
  source 1..18: mol_type = other RNA
aaacggatataaaggttg

SEQ ID NO: 289 - RNA, 18 nt, synthetic construct
  source 1..18: mol_type = other RNA
gaaacggatataaaggtt

SEQ ID NO: 290 - RNA, 18 nt, synthetic construct
  source 1..18: mol_type = other RNA
ggaaacggatataaaggt

SEQ ID NO: 291 - RNA, 18 nt, synthetic construct
  source 1..18: mol_type = other RNA
actggaaacggatataaa

SEQ ID NO: 292 - RNA, 18 nt, synthetic construct
  source 1..18: mol_type = other RNA
gactggaaacggatataa

SEQ ID NO: 293 - RNA, 18 nt, synthetic construct
  source 1..18: mol_type = other RNA
acctggactggaaacgga

SEQ ID NO: 294 - RNA, 18 nt, synthetic construct
  source 1..18: mol_type = other RNA
aatgacagcttcacaaac

SEQ ID NO: 295 - RNA, 18 nt, synthetic construct
  source 1..18: mol_type = other RNA
tggaatgacagcttcaca

SEQ ID NO: 296 - RNA, 18 nt, synthetic construct
  source 1..18: mol_type = other RNA
ctggaatgacagcttcac

SEQ ID NO: 297 - RNA, 18 nt, synthetic construct
  source 1..18: mol_type = other RNA
ttggctggaatgacagct

SEQ ID NO: 298 - RNA, 18 nt, synthetic construct
  source 1..18: mol_type = other RNA
accttggctggaatgaca

SEQ ID NO: 299 - RNA, 18 nt, synthetic construct
  source 1..18: mol_type = other RNA
aaccttggctggaatgac

SEQ ID NO: 300 - RNA, 18 nt, synthetic construct
  source 1..18: mol_type = other RNA
caaccttggctggaatga

SEQ ID NO: 301 - RNA, 18 nt, synthetic construct
  source 1..18: mol_type = other RNA
acaaccttggctggaatg

SEQ ID NO: 302 - RNA, 18 nt, synthetic construct
  source 1..18: mol_type = other RNA
tagcctcctatgctccca

SEQ ID NO: 303 - RNA, 18 nt, synthetic construct
  source 1..18: mol_type = other RNA
gtagcctcctatgctccc

SEQ ID NO: 304 - RNA, 18 nt, synthetic construct
  source 1..18: mol_type = other RNA
ttgtagcctcctatgctc

SEQ ID NO: 305 - RNA, 18 nt, synthetic construct
  source 1..18: mol_type = other RNA
gttgtagcctcctatgct

SEQ ID NO: 306 - RNA, 18 nt, synthetic construct
  source 1..18: mol_type = other RNA
gcgttgtagcctcctatg

SEQ ID NO: 307 - RNA, 18 nt, synthetic construct
  source 1..18: mol_type = other RNA
ggcgttgtagcctcctat

SEQ ID NO: 308 - RNA, 18 nt, synthetic construct
  source 1..18: mol_type = other RNA
gggcgttgtagcctccta

SEQ ID NO: 309 - RNA, 18 nt, synthetic construct
  source 1..18: mol_type = other RNA
tgggcgttgtagcctcct

SEQ ID NO: 310 - RNA, 18 nt, synthetic construct
  source 1..18: mol_type = other RNA
tgcatgggcgttgtagcc

SEQ ID NO: 311 - RNA, 18 nt, synthetic construct
  source 1..18: mol_type = other RNA
gctgcatgggcgttgtag

SEQ ID NO: 312 - RNA, 18 nt, synthetic construct
  source 1..18: mol_type = other RNA
tgctgcatgggcgttgta

SEQ ID NO: 313 - RNA, 18 nt, synthetic construct
  source 1..18: mol_type = other RNA
ttgctgcatgggcgttgt

SEQ ID NO: 314 - RNA, 18 nt, synthetic construct
  source 1..18: mol_type = other RNA
gtttgctgcatgggcgtt

SEQ ID NO: 315 - RNA, 18 nt, synthetic construct
  source 1..18: mol_type = other RNA
tgtttgctgcatgggcgt

SEQ ID NO: 316 - RNA, 18 nt, synthetic construct
  source 1..18: mol_type = other RNA
atgtttgctgcatgggcg

SEQ ID NO: 317 - RNA, 18 nt, synthetic construct
  source 1..18: mol_type = other RNA
gacaatgtttgctgcatg

SEQ ID NO: 318 - RNA, 18 nt, synthetic construct
  source 1..18: mol_type = other RNA
gtgctgcatcctgtccac

SEQ ID NO: 319 - RNA, 18 nt, synthetic construct
  source 1..18: mol_type = other RNA
caacattctgtgctgcat

SEQ ID NO: 320 - RNA, 18 nt, synthetic construct
  source 1..18: mol_type = other RNA
aatacagtttgaactacc

SEQ ID NO: 321 - RNA, 18 nt, synthetic construct
  source 1..18: mol_type = other RNA
taatacagtttgaactac

SEQ ID NO: 322 - RNA, 18 nt, synthetic construct
  source 1..18: mol_type = other RNA
gtaatacagtttgaacta

SEQ ID NO: 323 - RNA, 18 nt, synthetic construct
  source 1..18: mol_type = other RNA
tgcttccattaaagtaat

SEQ ID NO: 324 - RNA, 18 nt, synthetic construct
  source 1..18: mol_type = other RNA
ttgcttccattaaagtaa

SEQ ID NO: 325 - RNA, 18 nt, synthetic construct
  source 1..18: mol_type = other RNA
acttgcttccattaaagt

SEQ ID NO: 326 - RNA, 18 nt, synthetic construct
  source 1..18: mol_type = other RNA
cacttgcttccattaaag

SEQ ID NO: 327 - RNA, 18 nt, synthetic construct
  source 1..18: mol_type = other RNA
taaatcttcatttgtggg

SEQ ID NO: 328 - RNA, 18 nt, synthetic construct
  source 1..18: mol_type = other RNA
gcagctgatatataaatc

SEQ ID NO: 329 - RNA, 18 nt, synthetic construct
  source 1..18: mol_type = other RNA
agatggcatggtgcagct

SEQ ID NO: 330 - RNA, 18 nt, synthetic construct
  source 1..18: mol_type = other RNA
tagatggcatggtgcagc

SEQ ID NO: 331 - RNA, 18 nt, synthetic construct
  source 1..18: mol_type = other RNA
atagatggcatggtgcag

SEQ ID NO: 332 - RNA, 18 nt, synthetic construct
  source 1..18: mol_type = other RNA
tatagatggcatggtgca

SEQ ID NO: 333 - RNA, 18 nt, synthetic construct
  source 1..18: mol_type = other RNA
ctatagatggcatggtgc

SEQ ID NO: 334 - RNA, 18 nt, synthetic construct
  source 1..18: mol_type = other RNA
tctatagatggcatggtg

SEQ ID NO: 335 - RNA, 18 nt, synthetic construct
  source 1..18: mol_type = other RNA
ctctatagatggcatggt

SEQ ID NO: 336 - RNA, 18 nt, synthetic construct
  source 1..18: mol_type = other RNA
tctctatagatggcatgg

SEQ ID NO: 337 - RNA, 18 nt, synthetic construct
  source 1..18: mol_type = other RNA
cctatctctatagatggc

SEQ ID NO: 338 - RNA, 18 nt, synthetic construct
  source 1..18: mol_type = other RNA
caccgttcctatctctat

SEQ ID NO: 339 - RNA, 18 nt, synthetic construct
  source 1..18: mol_type = other RNA
ccaccgttcctatctcta

SEQ ID NO: 340 - RNA, 18 nt, synthetic construct
  source 1..18: mol_type = other RNA
cccaccgttcctatctct

SEQ ID NO: 341 - RNA, 18 nt, synthetic construct
  source 1..18: mol_type = other RNA
acaggcttgctgaggtag

SEQ ID NO: 342 - RNA, 18 nt, synthetic construct
  source 1..18: mol_type = other RNA
aacacctagcatctgcaa

SEQ ID NO: 343 - RNA, 18 nt, synthetic construct
  source 1..18: mol_type = other RNA
atctttgcatgctccttg

SEQ ID NO: 344 - RNA, 18 nt, synthetic construct
  source 1..18: mol_type = other RNA
tatctttgcatgctcctt

SEQ ID NO: 345 - RNA, 18 nt, synthetic construct
  source 1..18: mol_type = other RNA
ttatctttgcatgctcct

SEQ ID NO: 346 - RNA, 18 nt, synthetic construct
  source 1..18: mol_type = other RNA
attatctttgcatgctcc

SEQ ID NO: 347 - RNA, 18 nt, synthetic construct
  source 1..18: mol_type = other RNA
gattatctttgcatgctc

SEQ ID NO: 348 - RNA, 18 nt, synthetic construct
  source 1..18: mol_type = other RNA
ggattatctttgcatgct

SEQ ID NO: 349 - RNA, 18 nt, synthetic construct
  source 1..18: mol_type = other RNA
ttcgggcaagctgccggg

SEQ ID NO: 350 - RNA, 18 nt, synthetic construct
  source 1..18: mol_type = other RNA
cacaattcgggcaagctg

SEQ ID NO: 351 - RNA, 18 nt, synthetic construct
  source 1..18: mol_type = other RNA
acacaattcgggcaagct

SEQ ID NO: 352 - RNA, 18 nt, synthetic construct
  source 1..18: mol_type = other RNA
cacacaattcgggcaagc

SEQ ID NO: 353 - RNA, 18 nt, synthetic construct
  source 1..18: mol_type = other RNA
gtcctgctgccaatgctg

SEQ ID NO: 354 - RNA, 18 nt, synthetic construct
  source 1..18: mol_type = other RNA
tgtcctgctgccaatgct

SEQ ID NO: 355 - RNA, 18 nt, synthetic construct
  source 1..18: mol_type = other RNA
atgtcctgctgccaatgc

SEQ ID NO: 356 - RNA, 18 nt, synthetic construct
  source 1..18: mol_type = other RNA
tttgacaagatgtcctgc

SEQ ID NO: 357 - RNA, 18 nt, synthetic construct
  source 1..18: mol_type = other RNA
ttttgacaagatgtcctg

SEQ ID NO: 358 - RNA, 18 nt, synthetic construct
  source 1..18: mol_type = other RNA
acttttgacaagatgtcc

SEQ ID NO: 359 - RNA, 18 nt, synthetic construct
  source 1..18: mol_type = other RNA
gacttttgacaagatgtc

SEQ ID NO: 360 - RNA, 18 nt, synthetic construct
  source 1..18: mol_type = other RNA
tgacttttgacaagatgt

SEQ ID NO: 361 - RNA, 18 nt, synthetic construct
  source 1..18: mol_type = other RNA
agttctacatcccagact

SEQ ID NO: 362 - RNA, 18 nt, synthetic construct
  source 1..18: mol_type = other RNA
ggcctctctgaacaaata

SEQ ID NO: 363 - RNA, 18 nt, synthetic construct
  source 1..18: mol_type = other RNA
aggcctctctgaacaaat

SEQ ID NO: 364 - RNA, 18 nt, synthetic construct
  source 1..18: mol_type = other RNA
tatttcttgaacacttcc

SEQ ID NO: 365 - RNA, 18 nt, synthetic construct
  source 1..18: mol_type = other RNA
ttatttcttgaacacttc

SEQ ID NO: 366 - RNA, 18 nt, synthetic construct
  source 1..18: mol_type = other RNA
tagagtattttatcagta

SEQ ID NO: 367 - RNA, 18 nt, synthetic construct
  source 1..18: mol_type = other RNA
caagcaagccagggtttc

SEQ ID NO: 368 - RNA, 18 nt, synthetic construct
  source 1..18: mol_type = other RNA
tggccacaggaactaggc

SEQ ID NO: 369 - RNA, 18 nt, synthetic construct
  source 1..18: mol_type = other RNA
aacctcctggccacagga

SEQ ID NO: 370 - RNA, 18 nt, synthetic construct
  source 1..18: mol_type = other RNA
caccaacctcctggccac

SEQ ID NO: 371 - RNA, 18 nt, synthetic construct
  source 1..18: mol_type = other RNA
tcagtcaccaacctcctg

SEQ ID NO: 372 - RNA, 18 nt, synthetic construct
  source 1..18: mol_type = other RNA
attaagattcaataactc

SEQ ID NO: 373 - RNA, 18 nt, synthetic construct
  source 1..18: mol_type = other RNA
aattaagattcaataact

SEQ ID NO: 374 - RNA, 18 nt, synthetic construct
  source 1..18: mol_type = other RNA
aaattaagattcaataac

SEQ ID NO: 375 - RNA, 18 nt, synthetic construct
  source 1..18: mol_type = other RNA
caaaacttgtacattaaa

SEQ ID NO: 376 - RNA, 18 nt, synthetic construct
  source 1..18: mol_type = other RNA
tacaaaacttgtacatta

SEQ ID NO: 377 - RNA, 18 nt, synthetic construct
  source 1..18: mol_type = other RNA
taaggagttctttattat

SEQ ID NO: 378 - RNA, 18 nt, synthetic construct
  source 1..18: mol_type = other RNA
ataaggagttctttatta

SEQ ID NO: 379 - RNA, 18 nt, synthetic construct
  source 1..18: mol_type = other RNA
aataaggagttctttatt

SEQ ID NO: 380 - RNA, 18 nt, synthetic construct
  source 1..18: mol_type = other RNA
aaataaggagttctttat

SEQ ID NO: 381 - RNA, 18 nt, synthetic construct
  source 1..18: mol_type = other RNA
aaaataaggagttcttta

SEQ ID NO: 382 - RNA, 18 nt, synthetic construct
  source 1..18: mol_type = other RNA
acacttgaagcattagat

SEQ ID NO: 383 - RNA, 18 nt, synthetic construct
  source 1..18: mol_type = other RNA
acttccatgaaaagctca

SEQ ID NO: 384 - RNA, 18 nt, synthetic construct
  source 1..18: mol_type = other RNA
ccacttccatgaaaagct

SEQ ID NO: 385 - RNA, 18 nt, synthetic construct
  source 1..18: mol_type = other RNA
tgccacttccatgaaaag

SEQ ID NO: 386 - RNA, 18 nt, synthetic construct
  source 1..18: mol_type = other RNA
ttcactgccacttccatg

SEQ ID NO: 387 - RNA, 18 nt, synthetic construct
  source 1..18: mol_type = other RNA
gtaattgtacaaaacatt

SEQ ID NO: 388 - RNA, 21 nt, synthetic construct
  source 1..21: mol_type = other RNA
gctacaatgttgtcaagacta

SEQ ID NO: 389 - RNA, 21 nt, synthetic construct
  source 1..21: mol_type = other RNA
ctacaatgttgtcaagactta

SEQ ID NO: 390 - RNA, 21 nt, synthetic construct
  source 1..21: mol_type = other RNA
atgatgtccatgaacatgtta

SEQ ID NO: 391 - RNA, 21 nt, synthetic construct
  source 1..21: mol_type = other RNA
atatttacttccagttccaga

SEQ ID NO: 392 - RNA, 21 nt, synthetic construct
  source 1..21: mol_type = other RNA
atttacttccagttccagaaa

SEQ ID NO: 393 - RNA, 21 nt, synthetic construct
  source 1..21: mol_type = other RNA
aatgaagctttgcccttttta

SEQ ID NO: 394 - RNA, 21 nt, synthetic construct
  source 1..21: mol_type = other RNA
cacattagcaaagtttgccca

SEQ ID NO: 395 - RNA, 21 nt, synthetic construct
  source 1..21: mol_type = other RNA
acattagcaaagtttgcccta

SEQ ID NO: 396 - RNA, 21 nt, synthetic construct
  source 1..21: mol_type = other RNA
cattagcaaagtttgccctca

SEQ ID NO: 397 - RNA, 21 nt, synthetic construct
  source 1..21: mol_type = other RNA
tagcaaagtttgccctcagta

SEQ ID NO: 398 - RNA, 21 nt, synthetic construct
  source 1..21: mol_type = other RNA
gcaaagtttgccctcagttca

SEQ ID NO: 399 - RNA, 21 nt, synthetic construct
  source 1..21: mol_type = other RNA
actcacaggatgaagtaagga

SEQ ID NO: 400 - RNA, 21 nt, synthetic construct
  source 1..21: mol_type = other RNA
cacaggatgaagtaagggaaa

SEQ ID NO: 401 - RNA, 21 nt, synthetic construct
  source 1..21: mol_type = other RNA
caggatgaagtaagggaaaaa

SEQ ID NO: 402 - RNA, 21 nt, synthetic construct
  source 1..21: mol_type = other RNA
aggatgaagtaagggaaaata

SEQ ID NO: 403 - RNA, 21 nt, synthetic construct
  source 1..21: mol_type = other RNA
gcgagggtcgtccaatttgga

SEQ ID NO: 404 - RNA, 21 nt, synthetic construct
  source 1..21: mol_type = other RNA
cgagggtcgtccaatttggca

SEQ ID NO: 405 - RNA, 21 nt, synthetic construct
  source 1..21: mol_type = other RNA
gagggtcgtccaatttggcaa

SEQ ID NO: 406 - RNA, 21 nt, synthetic construct
  source 1..21: mol_type = other RNA
gtcgtccaatttggcagctca

SEQ ID NO: 407 - RNA, 21 nt, synthetic construct
  source 1..21: mol_type = other RNA
tcgtccaatttggcagctcaa

SEQ ID NO: 408 - RNA, 21 nt, synthetic construct
  source 1..21: mol_type = other RNA
cgtccaatttggcagctcaga

SEQ ID NO: 409 - RNA, 21 nt, synthetic construct
  source 1..21: mol_type = other RNA
tccaatttggcagctcagcca

SEQ ID NO: 410 - RNA, 21 nt, synthetic construct
  source 1..21: mol_type = other RNA
aatttggcagctcagccatta

SEQ ID NO: 411 - RNA, 21 nt, synthetic construct
  source 1..21: mol_type = other RNA
ttggcagctcagccattttga

SEQ ID NO: 412 - RNA, 21 nt, synthetic construct
  source 1..21: mol_type = other RNA
tggcagctcagccattttgca

SEQ ID NO: 413 - RNA, 21 nt, synthetic construct
  source 1..21: mol_type = other RNA
ccgagttttagaagaagaaga

SEQ ID NO: 414 - RNA, 21 nt, synthetic construct
  source 1..21: mol_type = other RNA
agagggtcaagatgattatga

SEQ ID NO: 415 - RNA, 21 nt, synthetic construct
  source 1..21: mol_type = other RNA
gggtcaagatgattatgtcta

SEQ ID NO: 416 - RNA, 21 nt, synthetic construct
  source 1..21: mol_type = other RNA
agtcgctggatagctgatcca

SEQ ID NO: 417 - RNA, 21 nt, synthetic construct
  source 1..21: mol_type = other RNA
gtcgctggatagctgatccta

SEQ ID NO: 418 - RNA, 21 nt, synthetic construct
  source 1..21: mol_type = other RNA
tcgctggatagctgatcctta

SEQ ID NO: 419 - RNA, 21 nt, synthetic construct
  source 1..21: mol_type = other RNA
aaaagttgaggttataaaaca

SEQ ID NO: 420 - RNA, 21 nt, synthetic construct
  source 1..21: mol_type = other RNA
aaagttgaggttataaaacca

SEQ ID NO: 421 - RNA, 21 nt, synthetic construct
  source 1..21: mol_type = other RNA
tggatatatgcccatccctga

SEQ ID NO: 422 - RNA, 21 nt, synthetic construct
  source 1..21: mol_type = other RNA
ggatatatgcccatccctgta

SEQ ID NO: 423 - RNA, 21 nt, synthetic construct
  source 1..21: mol_type = other RNA
atatatgcccatccctgttga

SEQ ID NO: 424 - RNA, 21 nt, synthetic construct
  source 1..21: mol_type = other RNA
tatatgcccatccctgttgga

SEQ ID NO: 425 - RNA, 21 nt, synthetic construct
  source 1..21: mol_type = other RNA
atatgcccatccctgttggaa

SEQ ID NO: 426 - RNA, 21 nt, synthetic construct
  source 1..21: mol_type = other RNA
tatgcccatccctgttggaga

SEQ ID NO: 427 - RNA, 21 nt, synthetic construct
  source 1..21: mol_type = other RNA
ggtggaggtgccagcagccga

SEQ ID NO: 428 - RNA, 21 nt, synthetic construct
  source 1..21: mol_type = other RNA
gtccttgcagatgggatgaca

SEQ ID NO: 429 - RNA, 21 nt, synthetic construct
  source 1..21: mol_type = other RNA
tccttgcagatgggatgacta

SEQ ID NO: 430 - RNA, 21 nt, synthetic construct
  source 1..21: mol_type = other RNA
cttgcagatgggatgactcga

SEQ ID NO: 431 - RNA, 21 nt, synthetic construct
  source 1..21: mol_type = other RNA
tgcgtcttccacgtgcttgta

SEQ ID NO: 432 - RNA, 21 nt, synthetic construct
  source 1..21: mol_type = other RNA
gcgtcttccacgtgcttgtga

SEQ ID NO: 433 - RNA, 21 nt, synthetic construct
  source 1..21: mol_type = other RNA
gtcttccacgtgcttgtgaca

SEQ ID NO: 434 - RNA, 21 nt, synthetic construct
  source 1..21: mol_type = other RNA
cacgtgcttgtgactctgcaa

SEQ ID NO: 435 - RNA, 21 nt, synthetic construct
  source 1..21: mol_type = other RNA
tgcttgtgactctgcagaaga

SEQ ID NO: 436 - RNA, 21 nt, synthetic construct
  source 1..21: mol_type = other RNA
tttatatccgtttccagtcca

SEQ ID NO: 437 - RNA, 21 nt, synthetic construct
  source 1..21: mol_type = other RNA
ttatatccgtttccagtccaa

SEQ ID NO: 438 - RNA, 21 nt, synthetic construct
  source 1..21: mol_type = other RNA
atatccgtttccagtccagga

SEQ ID NO: 439 - RNA, 21 nt, synthetic construct
  source 1..21: mol_type = other RNA
ctgccatggctgggagcataa

SEQ ID NO: 440 - RNA, 21 nt, synthetic construct
  source 1..21: mol_type = other RNA
tgccatggctgggagcataga

SEQ ID NO: 441 - RNA, 21 nt, synthetic construct
  source 1..21: mol_type = other RNA
gccatggctgggagcatagga

SEQ ID NO: 442 - RNA, 21 nt, synthetic construct
  source 1..21: mol_type = other RNA
acaggatgcagcacagaatga

SEQ ID NO: 443 - RNA, 21 nt, synthetic construct
  source 1..21: mol_type = other RNA
gtagttcaaactgtattacta

SEQ ID NO: 444 - RNA, 21 nt, synthetic construct
  source 1..21: mol_type = other RNA
gttcaaactgtattactttaa

SEQ ID NO: 445 - RNA, 21 nt, synthetic construct
  source 1..21: mol_type = other RNA
ttcaaactgtattactttaaa

SEQ ID NO: 446 - RNA, 21 nt, synthetic construct
  source 1..21: mol_type = other RNA
tcaaactgtattactttaata

SEQ ID NO: 447 - RNA, 21 nt, synthetic construct
  source 1..21: mol_type = other RNA
aactgtattactttaatggaa

SEQ ID NO: 448 - RNA, 21 nt, synthetic construct
  source 1..21: mol_type = other RNA
actgtattactttaatggaaa

SEQ ID NO: 449 - RNA, 21 nt, synthetic construct
  source 1..21: mol_type = other RNA
ctgtattactttaatggaaga

SEQ ID NO: 450 - RNA, 21 nt, synthetic construct
  source 1..21: mol_type = other RNA
tgtattactttaatggaagca

SEQ ID NO: 451 - RNA, 21 nt, synthetic construct
  source 1..21: mol_type = other RNA
ttatatatcagctgcaccata

SEQ ID NO: 452 - RNA, 21 nt, synthetic construct
  source 1..21: mol_type = other RNA
tatatatcagctgcaccatga

SEQ ID NO: 453 - RNA, 21 nt, synthetic construct
  source 1..21: mol_type = other RNA
atatatcagctgcaccatgca

SEQ ID NO: 454 - RNA, 21 nt, synthetic construct
  source 1..21: mol_type = other RNA
tatatcagctgcaccatgcca

SEQ ID NO: 455 - RNA, 21 nt, synthetic construct
  source 1..21: mol_type = other RNA
atatcagctgcaccatgccaa

SEQ ID NO: 456 - RNA, 21 nt, synthetic construct
  source 1..21: mol_type = other RNA
atcagctgcaccatgccatca

SEQ ID NO: 457 - RNA, 21 nt, synthetic construct
  source 1..21: mol_type = other RNA
tttgcagatgctaggtgttca

SEQ ID NO: 458 - RNA, 21 nt, synthetic construct
  source 1..21: mol_type = other RNA
tgcagatgctaggtgttcaaa

SEQ ID NO: 459 - RNA, 21 nt, synthetic construct
  source 1..21: mol_type = other RNA
gcagatgctaggtgttcaaga

SEQ ID NO: 460 - RNA, 21 nt, synthetic construct
  source 1..21: mol_type = other RNA
cagatgctaggtgttcaagga

SEQ ID NO: 461 - RNA, 21 nt, synthetic construct
  source 1..21: mol_type = other RNA
agatgctaggtgttcaaggaa

SEQ ID NO: 462 - RNA, 21 nt, synthetic construct
  source 1..21: mol_type = other RNA
gctaggtgttcaaggagcata

SEQ ID NO: 463 - RNA, 21 nt, synthetic construct
  source 1..21: mol_type = other RNA
taggtgttcaaggagcatgca

SEQ ID NO: 464 - RNA, 21 nt, synthetic construct
  source 1..21: mol_type = other RNA
aggtgttcaaggagcatgcaa

SEQ ID NO: 465 - RNA, 21 nt, synthetic construct
  source 1..21: mol_type = other RNA
ggtgttcaaggagcatgcaaa

SEQ ID NO: 466 - RNA, 21 nt, synthetic construct
  source 1..21: mol_type = other RNA
tgttcaaggagcatgcaaaga

SEQ ID NO: 467 - RNA, 21 nt, synthetic construct
  source 1..21: mol_type = other RNA
gttcaaggagcatgcaaagaa

SEQ ID NO: 468 - RNA, 21 nt, synthetic construct
  source 1..21: mol_type = other RNA
cccggcagcttgcccgaatta

SEQ ID NO: 469 - RNA, 21 nt, synthetic construct
  source 1..21: mol_type = other RNA
cggcagcttgcccgaattgta

SEQ ID NO: 470 - RNA, 21 nt, synthetic construct
  source 1..21: mol_type = other RNA
cattggcagcaggacatctta

SEQ ID NO: 471 - RNA, 21 nt, synthetic construct
  source 1..21: mol_type = other RNA
attggcagcaggacatcttga

SEQ ID NO: 472 - RNA, 21 nt, synthetic construct
  source 1..21: mol_type = other RNA
tggcagcaggacatcttgtca

SEQ ID NO: 473 - RNA, 21 nt, synthetic construct
  source 1..21: mol_type = other RNA
tatttgttcagagaggcctta

SEQ ID NO: 474 - RNA, 21 nt, synthetic construct
  source 1..21: mol_type = other RNA
ttactaaagatatcagagcta

SEQ ID NO: 475 - RNA, 21 nt, synthetic construct
  source 1..21: mol_type = other RNA
caaatctgtatatgttgtaaa

SEQ ID NO: 476 - RNA, 21 nt, synthetic construct
  source 1..21: mol_type = other RNA
aaatctgtatatgttgtaata

SEQ ID NO: 477 - RNA, 21 nt, synthetic construct
  source 1..21: mol_type = other RNA
gtactgataaaatactctaga

SEQ ID NO: 478 - RNA, 21 nt, synthetic construct
  source 1..21: mol_type = other RNA
ttgtccaggaaaccctggcta

SEQ ID NO: 479 - RNA, 21 nt, synthetic construct
  source 1..21: mol_type = other RNA
tccaggaaaccctggcttgca

SEQ ID NO: 480 - RNA, 21 nt, synthetic construct
  source 1..21: mol_type = other RNA
ttgtagaagatggactctgaa

SEQ ID NO: 481 - RNA, 21 nt, synthetic construct
  source 1..21: mol_type = other RNA
tgtagaagatggactctgaaa

SEQ ID NO: 482 - RNA, 21 nt, synthetic construct
  source 1..21: mol_type = other RNA
taatgttttgtacaattacta

SEQ ID NO: 483 - RNA, 21 nt, synthetic construct
  source 1..21: mol_type = other RNA
tatacattttgttatagaata

SEQ ID NO: 484 - RNA, 21 nt, synthetic construct
  source 1..21: mol_type = other RNA
tacattttgttatagaataca

SEQ ID NO: 485 - RNA, 21 nt, synthetic construct
  source 1..21: mol_type = other RNA
acattttgttatagaatacta

SEQ ID NO: 486 - RNA, 21 nt, synthetic construct
  source 1..21: mol_type = other RNA
caatgttgtcaagacttttta

SEQ ID NO: 487 - RNA, 21 nt, synthetic construct
  source 1..21: mol_type = other RNA
aatgttgtcaagactttttca

SEQ ID NO: 488 - RNA, 21 nt, synthetic construct
  source 1..21: mol_type = other RNA
atgttgtcaagactttttcga

SEQ ID NO: 489 - RNA, 21 nt, synthetic construct
  source 1..21: mol_type = other RNA
tctgcatgatgtccatgaaca

SEQ ID NO: 490 - RNA, 21 nt, synthetic construct
  source 1..21: mol_type = other RNA
ctgcatgatgtccatgaacaa

SEQ ID NO: 491 - RNA, 21 nt, synthetic construct
  source 1..21: mol_type = other RNA
taagatctgtggttggaatta

SEQ ID NO: 492 - RNA, 21 nt, synthetic construct
  source 1..21: mol_type = other RNA
aagatctgtggttggaattaa

SEQ ID NO: 493 - RNA, 21 nt, synthetic construct
  source 1..21: mol_type = other RNA
agatctgtggttggaattata

SEQ ID NO: 494 - RNA, 21 nt, synthetic construct
  source 1..21: mol_type = other RNA
tgtatatttacttccagttca

SEQ ID NO: 495 - RNA, 21 nt, synthetic construct
  source 1..21: mol_type = other RNA
gtatatttacttccagttcca

SEQ ID NO: 496 - RNA, 21 nt, synthetic construct
  source 1..21: mol_type = other RNA
tatatttacttccagttccaa

SEQ ID NO: 497 - RNA, 21 nt, synthetic construct
  source 1..21: mol_type = other RNA
tttacttccagttccagaata

SEQ ID NO: 498 - RNA, 21 nt, synthetic construct
  source 1..21: mol_type = other RNA
tattttgggtattgctggcca

SEQ ID NO: 499 - RNA, 21 nt, synthetic construct
  source 1..21: mol_type = other RNA
tattcagtacagttgtcatta

SEQ ID NO: 500 - RNA, 21 nt, synthetic construct
  source 1..21: mol_type = other RNA
attcagtacagttgtcattca

SEQ ID NO: 501 - RNA, 21 nt, synthetic construct
  source 1..21: mol_type = other RNA
agacaaagaattgacaggcta

SEQ ID NO: 502 - RNA, 21 nt, synthetic construct
  source 1..21: mol_type = other RNA
gacaaagaattgacaggctta

SEQ ID NO: 503 - RNA, 21 nt, synthetic construct
  source 1..21: mol_type = other RNA
gcttgaatgaagctttgccca

SEQ ID NO: 504 - RNA, 21 nt, synthetic construct
  source 1..21: mol_type = other RNA
cttgaatgaagctttgcccta

SEQ ID NO: 505 - RNA, 21 nt, synthetic construct
  source 1..21: mol_type = other RNA
ttgaatgaagctttgccctta

SEQ ID NO: 506 - RNA, 21 nt, synthetic construct
  source 1..21: mol_type = other RNA
atgaagctttgccctttttca

SEQ ID NO: 507 - RNA, 21 nt, synthetic construct
  source 1..21: mol_type = other RNA
caaagtttgccctcagttcca

SEQ ID NO: 508 - RNA, 21 nt, synthetic construct
  source 1..21: mol_type = other RNA
aagtttgccctcagttccaaa

SEQ ID NO: 509 - RNA, 21 nt, synthetic construct
  source 1..21: mol_type = other RNA
caactcacaggatgaagtaaa

SEQ ID NO: 510 - RNA, 21 nt, synthetic construct
  source 1..21: mol_type = other RNA
aactcacaggatgaagtaaga

SEQ ID NO: 511 - RNA, 21 nt, synthetic construct
  source 1..21: mol_type = other RNA
gaagtaagggaaaatattgca

SEQ ID NO: 512 - RNA, 21 nt, synthetic construct
  source 1..21: mol_type = other RNA
aagtaagggaaaatattgcta

SEQ ID NO: 513 - RNA, 21 nt, synthetic construct
  source 1..21: mol_type = other RNA
gtaagggaaaatattgctcga

SEQ ID NO: 514 - RNA, 21 nt, synthetic construct
  source 1..21: mol_type = other RNA
aagggaaaatattgctcgtga

SEQ ID NO: 515 - RNA, 21 nt, synthetic construct
  source 1..21: mol_type = other RNA
agggaaaatattgctcgtgga

SEQ ID NO: 516 - RNA, 21 nt, synthetic construct
  source 1..21: mol_type = other RNA
gggaaaatattgctcgtggaa

SEQ ID NO: 517 - RNA, 21 nt, synthetic construct
  source 1..21: mol_type = other RNA
ggaaaatattgctcgtggaaa

SEQ ID NO: 518 - RNA, 21 nt, synthetic construct
  source 1..21: mol_type = other RNA
aaatattgctcgtggaatgga

SEQ ID NO: 519 - RNA, 21 nt, synthetic construct
  source 1..21: mol_type = other RNA
aatattgctcgtggaatggca

SEQ ID NO: 520 - RNA, 21 nt, synthetic construct
  source 1..21: mol_type = other RNA
atattgctcgtggaatggcaa

SEQ ID NO: 521 - RNA, 21 nt, synthetic construct
  source 1..21: mol_type = other RNA
tattgctcgtggaatggcaaa

SEQ ID NO: 522 - RNA, 21 nt, synthetic construct
  source 1..21: mol_type = other RNA
attgctcgtggaatggcaata

SEQ ID NO: 523 - RNA, 21 nt, synthetic construct
  source 1..21: mol_type = other RNA
ttgctcgtggaatggcaatta

SEQ ID NO: 524 - RNA, 21 nt, synthetic construct
  source 1..21: mol_type = other RNA
ttgaatgtcttgtgattggaa

SEQ ID NO: 525 - RNA, 21 nt, synthetic construct
  source 1..21: mol_type = other RNA
tgaatgtcttgtgattggaga

SEQ ID NO: 526 - RNA, 21 nt, synthetic construct
  source 1..21: mol_type = other RNA
tcttgtgattggagttggtaa

SEQ ID NO: 527 - RNA, 21 nt, synthetic construct
  source 1..21: mol_type = other RNA
cttgtgattggagttggtaca

SEQ ID NO: 528 - RNA, 21 nt, synthetic construct
  source 1..21: mol_type = other RNA
ttgtgattggagttggtacca

SEQ ID NO: 529 - RNA, 21 nt, synthetic construct
  source 1..21: mol_type = other RNA
gtgattggagttggtaccata

SEQ ID NO: 530 - RNA, 21 nt, synthetic construct
  source 1..21: mol_type = other RNA
gattggagttggtaccatgta

SEQ ID NO: 531 - RNA, 21 nt, synthetic construct
  source 1..21: mol_type = other RNA
attggagttggtaccatgtca

SEQ ID NO: 532 - RNA, 21 nt, synthetic construct
  source 1..21: mol_type = other RNA
tggagttggtaccatgtcaga

SEQ ID NO: 533 - RNA, 21 nt, synthetic construct
  source 1..21: mol_type = other RNA
ggagttggtaccatgtcagga

SEQ ID NO: 534 - RNA, 21 nt, synthetic construct
  source 1..21: mol_type = other RNA
tatgtgctgctttggctgcaa

SEQ ID NO: 535 - RNA, 21 nt, synthetic construct
  source 1..21: mol_type = other RNA
ttgccaactacttcgtgttca

SEQ ID NO: 536 - RNA, 21 nt, synthetic construct
  source 1..21: mol_type = other RNA
tgccaactacttcgtgttcaa

SEQ ID NO: 537 - RNA, 21 nt, synthetic construct
  source 1..21: mol_type = other RNA
gccaactacttcgtgttcata

SEQ ID NO: 538 - RNA, 21 nt, synthetic construct
  source 1..21: mol_type = other RNA
ccaactacttcgtgttcatga

SEQ ID NO: 539 - RNA, 21 nt, synthetic construct
  source 1..21: mol_type = other RNA
aactacttcgtgttcatgaca

SEQ ID NO: 540 - RNA, 21 nt, synthetic construct
  source 1..21: mol_type = other RNA
attagagctttctcgggaaaa

SEQ ID NO: 541 - RNA, 21 nt, synthetic construct
  source 1..21: mol_type = other RNA
ttagagctttctcgggaaaga

SEQ ID NO: 542 - RNA, 21 nt, synthetic construct
  source 1..21: mol_type = other RNA
tagagctttctcgggaaagca

SEQ ID NO: 543 - RNA, 21 nt, synthetic construct
  source 1..21: mol_type = other RNA
gagctttctcgggaaagccga

SEQ ID NO: 544 - RNA, 21 nt, synthetic construct
  source 1..21: mol_type = other RNA
gggaaagccgcgagggtcgta

SEQ ID NO: 545 - RNA, 21 nt, synthetic construct
  source 1..21: mol_type = other RNA
ggaaagccgcgagggtcgtca

SEQ ID NO: 546 - RNA, 21 nt, synthetic construct
  source 1..21: mol_type = other RNA
gaaagccgcgagggtcgtcca

SEQ ID NO: 547 - RNA, 21 nt, synthetic construct
  source 1..21: mol_type = other RNA
aaagccgcgagggtcgtccaa

SEQ ID NO: 548 - RNA, 21 nt, synthetic construct
  source 1..21: mol_type = other RNA
aagccgcgagggtcgtccaaa

SEQ ID NO: 549 - RNA, 21 nt, synthetic construct
  source 1..21: mol_type = other RNA
agccgcgagggtcgtccaata

SEQ ID NO: 550 - RNA, 21 nt, synthetic construct
  source 1..21: mol_type = other RNA
gccgcgagggtcgtccaatta

SEQ ID NO: 551 - RNA, 21 nt, synthetic construct
  source 1..21: mol_type = other RNA
ccgcgagggtcgtccaattta

SEQ ID NO: 552 - RNA, 21 nt, synthetic construct
  source 1..21: mol_type = other RNA
cgcgagggtcgtccaatttga

SEQ ID NO: 553 - RNA, 21 nt, synthetic construct
  source 1..21: mol_type = other RNA
cccgagttttagaagaagaaa

SEQ ID NO: 554 - RNA, 21 nt, synthetic construct
  source 1..21: mol_type = other RNA
ctcagagggtcaagatgatta

SEQ ID NO: 555 - RNA, 21 nt, synthetic construct
  source 1..21: mol_type = other RNA
ggtcaagatgattatgtctca

SEQ ID NO: 556 - RNA, 21 nt, synthetic construct
  source 1..21: mol_type = other RNA
gtcaagatgattatgtctcta

SEQ ID NO: 557 - RNA, 21 nt, synthetic construct
  source 1..21: mol_type = other RNA
caagatgattatgtctctaga

SEQ ID NO: 558 - RNA, 21 nt, synthetic construct
  source 1..21: mol_type = other RNA
aagatgattatgtctctagga

SEQ ID NO: 559 - RNA, 21 nt, synthetic construct
  source 1..21: mol_type = other RNA
agatgattatgtctctaggca

SEQ ID NO: 560 - RNA, 21 nt, synthetic construct
  source 1..21: mol_type = other RNA
gatgattatgtctctaggcta

SEQ ID NO: 561 - RNA, 21 nt, synthetic construct
  source 1..21: mol_type = other RNA
atgattatgtctctaggctta

SEQ ID NO: 562 - RNA, 21 nt, synthetic construct
  source 1..21: mol_type = other RNA
tgattatgtctctaggcttga

SEQ ID NO: 563 - RNA, 21 nt, synthetic construct
  source 1..21: mol_type = other RNA
atgctcacagtcgctggataa

SEQ ID NO: 564 - RNA, 21 nt, synthetic construct
  source 1..21: mol_type = other RNA
tgctcacagtcgctggataga

SEQ ID NO: 565 - RNA, 21 nt, synthetic construct
  source 1..21: mol_type = other RNA
gctcacagtcgctggatagca

SEQ ID NO: 566 - RNA, 21 nt, synthetic construct
  source 1..21: mol_type = other RNA
ctcacagtcgctggatagcta

SEQ ID NO: 567 - RNA, 21 nt, synthetic construct
  source 1..21: mol_type = other RNA
tcacagtcgctggatagctga

SEQ ID NO: 568 - RNA, 21 nt, synthetic construct
  source 1..21: mol_type = other RNA
cacagtcgctggatagctgaa

SEQ ID NO: 569 - RNA, 21 nt, synthetic construct
  source 1..21: mol_type = other RNA
gaattgaaccaagtgtttcca

SEQ ID NO: 570 - RNA, 21 nt, synthetic construct
  source 1..21: mol_type = other RNA
gaaccaagtgtttccctctga

SEQ ID NO: 571 - RNA, 21 nt, synthetic construct
  source 1..21: mol_type = other RNA
aaatgatcagcatggatatta

SEQ ID NO: 572 - RNA, 21 nt, synthetic construct
  source 1..21: mol_type = other RNA
atgatcagcatggatattgaa

SEQ ID NO: 573 - RNA, 21 nt, synthetic construct
  source 1..21: mol_type = other RNA
tctccttctggctgtcaagta

SEQ ID NO: 574 - RNA, 21 nt, synthetic construct
  source 1..21: mol_type = other RNA
ctccttctggctgtcaagtaa

SEQ ID NO: 575 - RNA, 21 nt, synthetic construct
  source 1..21: mol_type = other RNA
aacagagacagaatctacaca

SEQ ID NO: 576 - RNA, 21 nt, synthetic construct
  source 1..21: mol_type = other RNA
acagagacagaatctacacta

SEQ ID NO: 577 - RNA, 21 nt, synthetic construct
  source 1..21: mol_type = other RNA
attgttgtagacgtgaaccta

SEQ ID NO: 578 - RNA, 21 nt, synthetic construct
  source 1..21: mol_type = other RNA
aagttgaggttataaaaccca

SEQ ID NO: 579 - RNA, 21 nt, synthetic construct
  source 1..21: mol_type = other RNA
gttgaggttataaaaccctta

SEQ ID NO: 580 - RNA, 21 nt, synthetic construct
  source 1..21: mol_type = other RNA
ttgaggttataaaacccttaa

SEQ ID NO: 581 - RNA, 21 nt, synthetic construct
  source 1..21: mol_type = other RNA
tgaggttataaaacccttaga

SEQ ID NO: 582 - RNA, 21 nt, synthetic construct
  source 1..21: mol_type = other RNA
gcagagaaaggtgcaaaatta

SEQ ID NO: 583 - RNA, 21 nt, synthetic construct
  source 1..21: mol_type = other RNA
cagagaaaggtgcaaaattca

SEQ ID NO: 584 - RNA, 21 nt, synthetic construct
  source 1..21: mol_type = other RNA
agagaaaggtgcaaaattcca

SEQ ID NO: 585 - RNA, 21 nt, synthetic construct
  source 1..21: mol_type = other RNA
gagaaaggtgcaaaattccta

SEQ ID NO: 586 - RNA, 21 nt, synthetic construct
  source 1..21: mol_type = other RNA
agaaaggtgcaaaattcctta

SEQ ID NO: 587 - RNA, 21 nt, synthetic construct
  source 1..21: mol_type = other RNA
gaaaggtgcaaaattccttaa

SEQ ID NO: 588 - RNA, 21 nt, synthetic construct
  source 1..21: mol_type = other RNA
aaaggtgcaaaattccttaga

SEQ ID NO: 589 - RNA, 21 nt, synthetic construct
  source 1..21: mol_type = other RNA
aaggtgcaaaattccttagta

SEQ ID NO: 590 - RNA, 21 nt, synthetic construct
  source 1..21: mol_type = other RNA
aggtgcaaaattccttagtga

SEQ ID NO: 591 - RNA, 21 nt, synthetic construct
  source 1..21: mol_type = other RNA
tgcaaaattccttagtgatga

SEQ ID NO: 592 - RNA, 21 nt, synthetic construct
  source 1..21: mol_type = other RNA
gcaaaattccttagtgatgca

SEQ ID NO: 593 - RNA, 21 nt, synthetic construct
  source 1..21: mol_type = other RNA
aattccttagtgatgctgaga

SEQ ID NO: 594 - RNA, 21 nt, synthetic construct
  source 1..21: mol_type = other RNA
tccttagtgatgctgagatca

SEQ ID NO: 595 - RNA, 21 nt, synthetic construct
  source 1..21: mol_type = other RNA
ccttagtgatgctgagatcaa

SEQ ID NO: 596 - RNA, 21 nt, synthetic construct
  source 1..21: mol_type = other RNA
ctgagatcatccagttagtca

SEQ ID NO: 597 - RNA, 21 nt, synthetic construct
  source 1..21: mol_type = other RNA
tgagatcatccagttagtcaa

SEQ ID NO: 598 - RNA, 21 nt, synthetic construct
  source 1..21: mol_type = other RNA
gagatcatccagttagtcaaa

SEQ ID NO: 599 - RNA, 21 nt, synthetic construct
  source 1..21: mol_type = other RNA
atcatccagttagtcaatgca

SEQ ID NO: 600 - RNA, 21 nt, synthetic construct
  source 1..21: mol_type = other RNA
gtcaatgctaagcatatccca

SEQ ID NO: 601 - RNA, 21 nt, synthetic construct
  source 1..21: mol_type = other RNA
ctaagcatatcccagcctaca

SEQ ID NO: 602 - RNA, 21 nt, synthetic construct
  source 1..21: mol_type = other RNA
aagcatatcccagcctacaaa

SEQ ID NO: 603 - RNA, 21 nt, synthetic construct
  source 1..21: mol_type = other RNA
tggaaactctgatggaaacta

SEQ ID NO: 604 - RNA, 21 nt, synthetic construct
  source 1..21: mol_type = other RNA
ggaaactctgatggaaactca

SEQ ID NO: 605 - RNA, 21 nt, synthetic construct
  source 1..21: mol_type = other RNA
gaaactctgatggaaactcaa

SEQ ID NO: 606 - RNA, 21 nt, synthetic construct
  source 1..21: mol_type = other RNA
aaactctgatggaaactcata

SEQ ID NO: 607 - RNA, 21 nt, synthetic construct
  source 1..21: mol_type = other RNA
gatggaaactcatgagcgtga

SEQ ID NO: 608 - RNA, 21 nt, synthetic construct
  source 1..21: mol_type = other RNA
atggaaactcatgagcgtgga

SEQ ID NO: 609 - RNA, 21 nt, synthetic construct
  source 1..21: mol_type = other RNA
tggaaactcatgagcgtggta

SEQ ID NO: 610 - RNA, 21 nt, synthetic construct
  source 1..21: mol_type = other RNA
ggaaactcatgagcgtggtga

SEQ ID NO: 611 - RNA, 21 nt, synthetic construct
  source 1..21: mol_type = other RNA
gaaactcatgagcgtggtgta

SEQ ID NO: 612 - RNA, 21 nt, synthetic construct
  source 1..21: mol_type = other RNA
agcgtggtgtatctattcgca

SEQ ID NO: 613 - RNA, 21 nt, synthetic construct
  source 1..21: mol_type = other RNA
taccttacagggattataata

SEQ ID NO: 614 - RNA, 21 nt, synthetic construct
  source 1..21: mol_type = other RNA
accttacagggattataatta

SEQ ID NO: 615 - RNA, 21 nt, synthetic construct
  source 1..21: mol_type = other RNA
gggattataattactccttga

SEQ ID NO: 616 - RNA, 21 nt, synthetic construct
  source 1..21: mol_type = other RNA
ggattataattactccttgga

SEQ ID NO: 617 - RNA, 21 nt, synthetic construct
  source 1..21: mol_type = other RNA
gattataattactccttggta

SEQ ID NO: 618 - RNA, 21 nt, synthetic construct
  source 1..21: mol_type = other RNA
attataattactccttggtga

SEQ ID NO: 619 - RNA, 21 nt, synthetic construct
  source 1..21: mol_type = other RNA
aattactccttggtgatggga

SEQ ID NO: 620 - RNA, 21 nt, synthetic construct
  source 1..21: mol_type = other RNA
attactccttggtgatgggaa

SEQ ID NO: 621 - RNA, 21 nt, synthetic construct
  source 1..21: mol_type = other RNA
ccttggtgatgggagcttgta

SEQ ID NO: 622 - RNA, 21 nt, synthetic construct
  source 1..21: mol_type = other RNA
tggtgatgggagcttgttgta

SEQ ID NO: 623 - RNA, 21 nt, synthetic construct
  source 1..21: mol_type = other RNA
tattggatatatgcccatcca

SEQ ID NO: 624 - RNA, 21 nt, synthetic construct
  source 1..21: mol_type = other RNA
attggatatatgcccatccca

SEQ ID NO: 625 - RNA, 21 nt, synthetic construct
  source 1..21: mol_type = other RNA
cagaaggttgtcttgtggcca

SEQ ID NO: 626 - RNA, 21 nt, synthetic construct
  source 1..21: mol_type = other RNA
aggttgtcttgtggccagcaa

SEQ ID NO: 627 - RNA, 21 nt, synthetic construct
  source 1..21: mol_type = other RNA
ttgtcttgtggccagcaccaa

SEQ ID NO: 628 - RNA, 21 nt, synthetic construct
  source 1..21: mol_type = other RNA
tgtcttgtggccagcaccaaa

SEQ ID NO: 629 - RNA, 21 nt, synthetic construct
  source 1..21: mol_type = other RNA
aggtcttggtggaggtgccaa

SEQ ID NO: 630 - RNA, 21 nt, synthetic construct
  source 1..21: mol_type = other RNA
ggtcttggtggaggtgccaga

SEQ ID NO: 631 - RNA, 21 nt, synthetic construct
  source 1..21: mol_type = other RNA
gtggaggtgccagcagccgaa

SEQ ID NO: 632 - RNA, 21 nt, synthetic construct
  source 1..21: mol_type = other RNA
gtgccagcagccgagtcctta

SEQ ID NO: 633 - RNA, 21 nt, synthetic construct
  source 1..21: mol_type = other RNA
cagcagccgagtccttgcaga

SEQ ID NO: 634 - RNA, 21 nt, synthetic construct
  source 1..21: mol_type = other RNA
agcagccgagtccttgcagaa

SEQ ID NO: 635 - RNA, 21 nt, synthetic construct
  source 1..21: mol_type = other RNA
gcagccgagtccttgcagata

SEQ ID NO: 636 - RNA, 21 nt, synthetic construct
  source 1..21: mol_type = other RNA
cagccgagtccttgcagatga

SEQ ID NO: 637 - RNA, 21 nt, synthetic construct
  source 1..21: mol_type = other RNA
gccgagtccttgcagatggga

SEQ ID NO: 638 - RNA, 21 nt, synthetic construct
  source 1..21: mol_type = other RNA
cgagtccttgcagatgggata

SEQ ID NO: 639 - RNA, 21 nt, synthetic construct
  source 1..21: mol_type = other RNA
ttgcagatgggatgactcgta

SEQ ID NO: 640 - RNA, 21 nt, synthetic construct
  source 1..21: mol_type = other RNA
tgcagatgggatgactcgtga

SEQ ID NO: 641 - RNA, 21 nt, synthetic construct
  source 1..21: mol_type = other RNA
gcagatgggatgactcgtgga

SEQ ID NO: 642 - RNA, 21 nt, synthetic construct
  source 1..21: mol_type = other RNA
cagatgggatgactcgtggca

SEQ ID NO: 643 - RNA, 21 nt, synthetic construct
  source 1..21: mol_type = other RNA
agatgggatgactcgtggcca

SEQ ID NO: 644 - RNA, 21 nt, synthetic construct
  source 1..21: mol_type = other RNA
gatgggatgactcgtggccca

SEQ ID NO: 645 - RNA, 21 nt, synthetic construct
  source 1..21: mol_type = other RNA
atgggatgactcgtggcccaa

SEQ ID NO: 646 - RNA, 21 nt, synthetic construct
  source 1..21: mol_type = other RNA
tgggatgactcgtggcccaga

SEQ ID NO: 647 - RNA, 21 nt, synthetic construct
  source 1..21: mol_type = other RNA
gggatgactcgtggcccagta

SEQ ID NO: 648 - RNA, 21 nt, synthetic construct
  source 1..21: mol_type = other RNA
gtggcccagttgtgcgtctta

SEQ ID NO: 649 - RNA, 21 nt, synthetic construct
  source 1..21: mol_type = other RNA
tggcccagttgtgcgtcttca

SEQ ID NO: 650 - RNA, 21 nt, synthetic construct
  source 1..21: mol_type = other RNA
gcccagttgtgcgtcttccaa

SEQ ID NO: 651 - RNA, 21 nt, synthetic construct
  source 1..21: mol_type = other RNA
cccagttgtgcgtcttccaca

SEQ ID NO: 652 - RNA, 21 nt, synthetic construct
  source 1..21: mol_type = other RNA
ccagttgtgcgtcttccacga

SEQ ID NO: 653 - RNA, 21 nt, synthetic construct
  source 1..21: mol_type = other RNA
cagttgtgcgtcttccacgta

SEQ ID NO: 654 - RNA, 21 nt, synthetic construct
  source 1..21: mol_type = other RNA
agttgtgcgtcttccacgtga

SEQ ID NO: 655 - RNA, 21 nt, synthetic construct
  source 1..21: mol_type = other RNA
ttgtgactctgcagaagtgaa

SEQ ID NO: 656 - RNA, 21 nt, synthetic construct
  source 1..21: mol_type = other RNA
ctgaagggttcgcagtgataa

SEQ ID NO: 657 - RNA, 21 nt, synthetic construct
  source 1..21: mol_type = other RNA
tgaagggttcgcagtgataaa

SEQ ID NO: 658 - RNA, 21 nt, synthetic construct
  source 1..21: mol_type = other RNA
gaagggttcgcagtgataaaa

SEQ ID NO: 659 - RNA, 21 nt, synthetic construct
  source 1..21: mol_type = other RNA
agggttcgcagtgataaagga

SEQ ID NO: 660 - RNA, 21 nt, synthetic construct
  source 1..21: mol_type = other RNA
gggttcgcagtgataaaggaa

SEQ ID NO: 661 - RNA, 21 nt, synthetic construct
  source 1..21: mol_type = other RNA
ttcgcagtgataaaggaggca

SEQ ID NO: 662 - RNA, 21 nt, synthetic construct
  source 1..21: mol_type = other RNA
cagtgataaaggaggcattta

SEQ ID NO: 663 - RNA, 21 nt, synthetic construct
  source 1..21: mol_type = other RNA
ctagcagatttgcacgtctaa

SEQ ID NO: 664 - RNA, 21 nt, synthetic construct
  source 1..21: mol_type = other RNA
tagcagatttgcacgtctaca

SEQ ID NO: 665 - RNA, 21 nt, synthetic construct
  source 1..21: mol_type = other RNA
agcagatttgcacgtctacaa

SEQ ID NO: 666 - RNA, 21 nt, synthetic construct
  source 1..21: mol_type = other RNA
gcagatttgcacgtctacaga

SEQ ID NO: 667 - RNA, 21 nt, synthetic construct
  source 1..21: mol_type = other RNA
cagatttgcacgtctacagaa

SEQ ID NO: 668 - RNA, 21 nt, synthetic construct
  source 1..21: mol_type = other RNA
gatttgcacgtctacagaaaa

SEQ ID NO: 669 - RNA, 21 nt, synthetic construct
  source 1..21: mol_type = other RNA
atttgcacgtctacagaaaca

SEQ ID NO: 670 - RNA, 21 nt, synthetic construct
  source 1..21: mol_type = other RNA
ctggacgcaacctttatatca

SEQ ID NO: 671 - RNA, 21 nt, synthetic construct
  source 1..21: mol_type = other RNA
tggacgcaacctttatatcca

SEQ ID NO: 672 - RNA, 21 nt, synthetic construct
  source 1..21: mol_type = other RNA
ggacgcaacctttatatccga

SEQ ID NO: 673 - RNA, 21 nt, synthetic construct
  source 1..21: mol_type = other RNA
gacgcaacctttatatccgta

SEQ ID NO: 674 - RNA, 21 nt, synthetic construct
  source 1..21: mol_type = other RNA
cgcaacctttatatccgttta

SEQ ID NO: 675 - RNA, 21 nt, synthetic construct
  source 1..21: mol_type = other RNA
gcaacctttatatccgtttca

SEQ ID NO: 676 - RNA, 21 nt, synthetic construct
  source 1..21: mol_type = other RNA
caacctttatatccgtttcca

SEQ ID NO: 677 - RNA, 21 nt, synthetic construct
  source 1..21: mol_type = other RNA
cctttatatccgtttccagta

SEQ ID NO: 678 - RNA, 21 nt, synthetic construct
  source 1..21: mol_type = other RNA
ctttatatccgtttccagtca

SEQ ID NO: 679 - RNA, 21 nt, synthetic construct
  source 1..21: mol_type = other RNA
tatccgtttccagtccaggta

SEQ ID NO: 680 - RNA, 21 nt, synthetic construct
  source 1..21: mol_type = other RNA
ttgtttgtgaagctgtcatta

SEQ ID NO: 681 - RNA, 21 nt, synthetic construct
  source 1..21: mol_type = other RNA
tttgtgaagctgtcattccaa

SEQ ID NO: 682 - RNA, 21 nt, synthetic construct
  source 1..21: mol_type = other RNA
ttgtgaagctgtcattccaga

SEQ ID NO: 683 - RNA, 21 nt, synthetic construct
  source 1..21: mol_type = other RNA
gaagctgtcattccagccaaa

SEQ ID NO: 684 - RNA, 21 nt, synthetic construct
  source 1..21: mol_type = other RNA
gctgtcattccagccaaggta

SEQ ID NO: 685 - RNA, 21 nt, synthetic construct
  source 1..21: mol_type = other RNA
ctgtcattccagccaaggtta

SEQ ID NO: 686 - RNA, 21 nt, synthetic construct
  source 1..21: mol_type = other RNA
tgtcattccagccaaggttga

SEQ ID NO: 687 - RNA, 21 nt, synthetic construct
  source 1..21: mol_type = other RNA
gtcattccagccaaggttgta

SEQ ID NO: 688 - RNA, 21 nt, synthetic construct
  source 1..21: mol_type = other RNA
gctgggagcataggaggctaa

SEQ ID NO: 689 - RNA, 21 nt, synthetic construct
  source 1..21: mol_type = other RNA
ctgggagcataggaggctaca

SEQ ID NO: 690 - RNA, 21 nt, synthetic construct
  source 1..21: mol_type = other RNA
gggagcataggaggctacaaa

SEQ ID NO: 691 - RNA, 21 nt, synthetic construct
  source 1..21: mol_type = other RNA
ggagcataggaggctacaaca

SEQ ID NO: 692 - RNA, 21 nt, synthetic construct
  source 1..21: mol_type = other RNA
agcataggaggctacaacgca

SEQ ID NO: 693 - RNA, 21 nt, synthetic construct
  source 1..21: mol_type = other RNA
gcataggaggctacaacgcca

SEQ ID NO: 694 - RNA, 21 nt, synthetic construct
  source 1..21: mol_type = other RNA
cataggaggctacaacgccca

SEQ ID NO: 695 - RNA, 21 nt, synthetic construct
  source 1..21: mol_type = other RNA
ataggaggctacaacgcccaa

SEQ ID NO: 696 - RNA, 21 nt, synthetic construct
  source 1..21: mol_type = other RNA
gaggctacaacgcccatgcaa

SEQ ID NO: 697 - RNA, 21 nt, synthetic construct
  source 1..21: mol_type = other RNA
ggctacaacgcccatgcagca

SEQ ID NO: 698 - RNA, 21 nt, synthetic construct
  source 1..21: mol_type = other RNA
gctacaacgcccatgcagcaa

SEQ ID NO: 699 - RNA, 21 nt, synthetic construct
  source 1..21: mol_type = other RNA
ctacaacgcccatgcagcaaa

SEQ ID NO: 700 - RNA, 21 nt, synthetic construct
  source 1..21: mol_type = other RNA
acaacgcccatgcagcaaaca

SEQ ID NO: 701 - RNA, 21 nt, synthetic construct
  source 1..21: mol_type = other RNA
caacgcccatgcagcaaacaa

SEQ ID NO: 702 - RNA, 21 nt, synthetic construct
  source 1..21: mol_type = other RNA
aacgcccatgcagcaaacata

SEQ ID NO: 703 - RNA, 21 nt, synthetic construct
  source 1..21: mol_type = other RNA
cccatgcagcaaacattgtca

SEQ ID NO: 704 - RNA, 21 nt, synthetic construct
  source 1..21: mol_type = other RNA
ctgtggacaggatgcagcaca

SEQ ID NO: 705 - RNA, 21 nt, synthetic construct
  source 1..21: mol_type = other RNA
ggatgcagcacagaatgttga

SEQ ID NO: 706 - RNA, 21 nt, synthetic construct
  source 1..21: mol_type = other RNA
ttggtagttcaaactgtatta

SEQ ID NO: 707 - RNA, 21 nt, synthetic construct
  source 1..21: mol_type = other RNA
tggtagttcaaactgtattaa

SEQ ID NO: 708 - RNA, 21 nt, synthetic construct
  source 1..21: mol_type = other RNA
ggtagttcaaactgtattaca

SEQ ID NO: 709 - RNA, 21 nt, synthetic construct
  source 1..21: mol_type = other RNA
gtattactttaatggaagcaa

SEQ ID NO: 710 - RNA, 21 nt, synthetic construct
  source 1..21: mol_type = other RNA
tattactttaatggaagcaaa

SEQ ID NO: 711 - RNA, 21 nt, synthetic construct
  source 1..21: mol_type = other RNA
ttactttaatggaagcaagta

SEQ ID NO: 712 - RNA, 21 nt, synthetic construct
  source 1..21: mol_type = other RNA
tactttaatggaagcaagtga

SEQ ID NO: 713 - RNA, 21 nt, synthetic construct
  source 1..21: mol_type = other RNA
gtcccacaaatgaagatttaa

SEQ ID NO: 714 - RNA, 21 nt, synthetic construct
  source 1..21: mol_type = other RNA
aagatttatatatcagctgca

SEQ ID NO: 715 - RNA, 21 nt, synthetic construct
  source 1..21: mol_type = other RNA
tcagctgcaccatgccatcta

SEQ ID NO: 716 - RNA, 21 nt, synthetic construct
  source 1..21: mol_type = other RNA
cagctgcaccatgccatctaa

SEQ ID NO: 717 - RNA, 21 nt, synthetic construct
  source 1..21: mol_type = other RNA
agctgcaccatgccatctata

SEQ ID NO: 718 - RNA, 21 nt, synthetic construct
  source 1..21: mol_type = other RNA
gctgcaccatgccatctataa

SEQ ID NO: 719 - RNA, 21 nt, synthetic construct
  source 1..21: mol_type = other RNA
ctgcaccatgccatctataga

SEQ ID NO: 720 - RNA, 21 nt, synthetic construct
  source 1..21: mol_type = other RNA
tgcaccatgccatctatagaa

SEQ ID NO: 721 - RNA, 21 nt, synthetic construct
  source 1..21: mol_type = other RNA
gcaccatgccatctatagaga

SEQ ID NO: 722 - RNA, 21 nt, synthetic construct
  source 1..21: mol_type = other RNA
caccatgccatctatagagaa

SEQ ID NO: 723 - RNA, 21 nt, synthetic construct
  source 1..21: mol_type = other RNA
atgccatctatagagatagga

SEQ ID NO: 724 - RNA, 21 nt, synthetic construct
  source 1..21: mol_type = other RNA
ctatagagataggaacggtga

SEQ ID NO: 725 - RNA, 21 nt, synthetic construct
  source 1..21: mol_type = other RNA
tatagagataggaacggtgga

SEQ ID NO: 726 - RNA, 21 nt, synthetic construct
  source 1..21: mol_type = other RNA
atagagataggaacggtggga

SEQ ID NO: 727 - RNA, 21 nt, synthetic construct
  source 1..21: mol_type = other RNA
tactacctcagcaagcctgta

SEQ ID NO: 728 - RNA, 21 nt, synthetic construct
  source 1..21: mol_type = other RNA
gtttgcagatgctaggtgtta

SEQ ID NO: 729 - RNA, 21 nt, synthetic construct
  source 1..21: mol_type = other RNA
ttcaaggagcatgcaaagata

SEQ ID NO: 730 - RNA, 21 nt, synthetic construct
  source 1..21: mol_type = other RNA
tcaaggagcatgcaaagataa

SEQ ID NO: 731 - RNA, 21 nt, synthetic construct
  source 1..21: mol_type = other RNA
caaggagcatgcaaagataaa

SEQ ID NO: 732 - RNA, 21 nt, synthetic construct
  source 1..21: mol_type = other RNA
aaggagcatgcaaagataata

SEQ ID NO: 733 - RNA, 21 nt, synthetic construct
  source 1..21: mol_type = other RNA
aggagcatgcaaagataatca

SEQ ID NO: 734 - RNA, 21 nt, synthetic construct
  source 1..21: mol_type = other RNA
ggagcatgcaaagataatcca

SEQ ID NO: 735 - RNA, 21 nt, synthetic construct
  source 1..21: mol_type = other RNA
tgcccggcagcttgcccgaaa

SEQ ID NO: 736 - RNA, 21 nt, synthetic construct
  source 1..21: mol_type = other RNA
ggcagcttgcccgaattgtga

SEQ ID NO: 737 - RNA, 21 nt, synthetic construct
  source 1..21: mol_type = other RNA
gcagcttgcccgaattgtgta

SEQ ID NO: 738 - RNA, 21 nt, synthetic construct
  source 1..21: mol_type = other RNA
cagcttgcccgaattgtgtga

SEQ ID NO: 739 - RNA, 21 nt, synthetic construct
  source 1..21: mol_type = other RNA
ggcagcattggcagcaggaca

SEQ ID NO: 740 - RNA, 21 nt, synthetic construct
  source 1..21: mol_type = other RNA
gcagcattggcagcaggacaa

SEQ ID NO: 741 - RNA, 21 nt, synthetic construct
  source 1..21: mol_type = other RNA
cagcattggcagcaggacata

SEQ ID NO: 742 - RNA, 21 nt, synthetic construct
  source 1..21: mol_type = other RNA
cagcaggacatcttgtcaaaa

SEQ ID NO: 743 - RNA, 21 nt, synthetic construct
  source 1..21: mol_type = other RNA
agcaggacatcttgtcaaaaa

SEQ ID NO: 744 - RNA, 21 nt, synthetic construct
  source 1..21: mol_type = other RNA
caggacatcttgtcaaaagta

SEQ ID NO: 745 - RNA, 21 nt, synthetic construct
  source 1..21: mol_type = other RNA
aggacatcttgtcaaaagtca

SEQ ID NO: 746 - RNA, 21 nt, synthetic construct
  source 1..21: mol_type = other RNA
ggacatcttgtcaaaagtcaa

SEQ ID NO: 747 - RNA, 21 nt, synthetic construct
  source 1..21: mol_type = other RNA
taagtctgggatgtagaacta

SEQ ID NO: 748 - RNA, 21 nt, synthetic construct
  source 1..21: mol_type = other RNA
gctatttgttcagagaggcca

SEQ ID NO: 749 - RNA, 21 nt, synthetic construct
  source 1..21: mol_type = other RNA
ctatttgttcagagaggccta

SEQ ID NO: 750 - RNA, 21 nt, synthetic construct
  source 1..21: mol_type = other RNA
ttggaagtgttcaagaaataa

SEQ ID NO: 751 - RNA, 21 nt, synthetic construct
  source 1..21: mol_type = other RNA
tggaagtgttcaagaaataaa

SEQ ID NO: 752 - RNA, 21 nt, synthetic construct
  source 1..21: mol_type = other RNA
tgtactgataaaatactctaa

SEQ ID NO: 753 - RNA, 21 nt, synthetic construct
  source 1..21: mol_type = other RNA
aggaaaccctggcttgcttga

SEQ ID NO: 754 - RNA, 21 nt, synthetic construct
  source 1..21: mol_type = other RNA
gtgcctagttcctgtggccaa

SEQ ID NO: 755 - RNA, 21 nt, synthetic construct
  source 1..21: mol_type = other RNA
gttcctgtggccaggaggtta

SEQ ID NO: 756 - RNA, 21 nt, synthetic construct
  source 1..21: mol_type = other RNA
ctgtggccaggaggttggtga

SEQ ID NO: 757 - RNA, 21 nt, synthetic construct
  source 1..21: mol_type = other RNA
gccaggaggttggtgactgaa

SEQ ID NO: 758 - RNA, 21 nt, synthetic construct
  source 1..21: mol_type = other RNA
cagagttattgaatcttaata

SEQ ID NO: 759 - RNA, 21 nt, synthetic construct
  source 1..21: mol_type = other RNA
agagttattgaatcttaatta

SEQ ID NO: 760 - RNA, 21 nt, synthetic construct
  source 1..21: mol_type = other RNA
gagttattgaatcttaattta

SEQ ID NO: 761 - RNA, 21 nt, synthetic construct
  source 1..21: mol_type = other RNA
tttttaatgtacaagttttga

SEQ ID NO: 762 - RNA, 21 nt, synthetic construct
  source 1..21: mol_type = other RNA
tttaatgtacaagttttgtaa

SEQ ID NO: 763 - RNA, 21 nt, synthetic construct
  source 1..21: mol_type = other RNA
aaataataaagaactccttaa

SEQ ID NO: 764 - RNA, 21 nt, synthetic construct
  source 1..21: mol_type = other RNA
aataataaagaactccttata

SEQ ID NO: 765 - RNA, 21 nt, synthetic construct
  source 1..21: mol_type = other RNA
ataataaagaactccttatta

SEQ ID NO: 766 - RNA, 21 nt, synthetic construct
  source 1..21: mol_type = other RNA
taataaagaactccttattta

SEQ ID NO: 767 - RNA, 21 nt, synthetic construct
  source 1..21: mol_type = other RNA
aataaagaactccttatttta

SEQ ID NO: 768 - RNA, 21 nt, synthetic construct
  source 1..21: mol_type = other RNA
acatctaatgcttcaagtgta

SEQ ID NO: 769 - RNA, 21 nt, synthetic construct
  source 1..21: mol_type = other RNA
tctgagcttttcatggaagta

SEQ ID NO: 770 - RNA, 21 nt, synthetic construct
  source 1..21: mol_type = other RNA
tgagcttttcatggaagtgga

SEQ ID NO: 771 - RNA, 21 nt, synthetic construct
  source 1..21: mol_type = other RNA
agcttttcatggaagtggcaa

SEQ ID NO: 772 - RNA, 21 nt, synthetic construct
  source 1..21: mol_type = other RNA
ttcatggaagtggcagtgaaa

SEQ ID NO: 773 - RNA, 21 nt, synthetic construct
  source 1..21: mol_type = other RNA
ttaatgttttgtacaattaca

SEQ ID NO: 774 - RNA, 23 nt, synthetic construct
  source 1..23: mol_type = other RNA
tagtcttgacaacattgtagcta

SEQ ID NO: 775 - RNA, 23 nt, synthetic construct
  source 1..23: mol_type = other RNA
taagtcttgacaacattgtagct

SEQ ID NO: 776 - RNA, 23 nt, synthetic construct
  source 1..23: mol_type = other RNA
taacatgttcatggacatcatgc

SEQ ID NO: 777 - RNA, 23 nt, synthetic construct
  source 1..23: mol_type = other RNA
tctggaactggaagtaaatatac

SEQ ID NO: 778 - RNA, 23 nt, synthetic construct
  source 1..23: mol_type = other RNA
tttctggaactggaagtaaatat

SEQ ID NO: 779 - RNA, 23 nt, synthetic construct
  source 1..23: mol_type = other RNA
taaaaagggcaaagcttcattca

SEQ ID NO: 780 - RNA, 23 nt, synthetic construct
  source 1..23: mol_type = other RNA
tgggcaaactttgctaatgtgct

SEQ ID NO: 781 - RNA, 23 nt, synthetic construct
  source 1..23: mol_type = other RNA
tagggcaaactttgctaatgtgc

SEQ ID NO: 782 - RNA, 23 nt, synthetic construct
  source 1..23: mol_type = other RNA
tgagggcaaactttgctaatgtg

SEQ ID NO: 783 - RNA, 23 nt, synthetic construct
  source 1..23: mol_type = other RNA
tactgagggcaaactttgctaat

SEQ ID NO: 784 - RNA, 23 nt, synthetic construct
  source 1..23: mol_type = other RNA
tgaactgagggcaaactttgcta

SEQ ID NO: 785 - RNA, 23 nt, synthetic construct
  source 1..23: mol_type = other RNA
tccttacttcatcctgtgagttg

SEQ ID NO: 786 - RNA, 23 nt, synthetic construct
  source 1..23: mol_type = other RNA
tttcccttacttcatcctgtgag

SEQ ID NO: 787 - RNA, 23 nt, synthetic construct
  source 1..23: mol_type = other RNA
tttttcccttacttcatcctgtg

SEQ ID NO: 788 - RNA, 23 nt, synthetic construct
  source 1..23: mol_type = other RNA
tattttcccttacttcatcctgt

SEQ ID NO: 789 - RNA, 23 nt, synthetic construct
  source 1..23: mol_type = other RNA
tccaaattggacgaccctcgcgg

SEQ ID NO: 790 - RNA, 23 nt, synthetic construct
  source 1..23: mol_type = other RNA
tgccaaattggacgaccctcgcg

SEQ ID NO: 791 - RNA, 23 nt, synthetic construct
  source 1..23: mol_type = other RNA
ttgccaaattggacgaccctcgc

SEQ ID NO: 792 - RNA, 23 nt, synthetic construct
  source 1..23: mol_type = other RNA
tgagctgccaaattggacgaccc

SEQ ID NO: 793 - RNA, 23 nt, synthetic construct
  source 1..23: mol_type = other RNA
ttgagctgccaaattggacgacc

SEQ ID NO: 794 - RNA, 23 nt, synthetic construct
  source 1..23: mol_type = other RNA
tctgagctgccaaattggacgac

SEQ ID NO: 795 - RNA, 23 nt, synthetic construct
  source 1..23: mol_type = other RNA
tggctgagctgccaaattggacg

SEQ ID NO: 796 - RNA, 23 nt, synthetic construct
  source 1..23: mol_type = other RNA
taatggctgagctgccaaattgg

SEQ ID NO: 797 - RNA, 23 nt, synthetic construct
  source 1..23: mol_type = other RNA
tcaaaatggctgagctgccaaat

SEQ ID NO: 798 - RNA, 23 nt, synthetic construct
  source 1..23: mol_type = other RNA
tgcaaaatggctgagctgccaaa

SEQ ID NO: 799 - RNA, 23 nt, synthetic construct
  source 1..23: mol_type = other RNA
tcttcttcttctaaaactcgggc

SEQ ID NO: 800 - RNA, 23 nt, synthetic construct
  source 1..23: mol_type = other RNA
tcataatcatcttgaccctctga

SEQ ID NO: 801 - RNA, 23 nt, synthetic construct
  source 1..23: mol_type = other RNA
tagacataatcatcttgaccctc

SEQ ID NO: 802 - RNA, 23 nt, synthetic construct
  source 1..23: mol_type = other RNA
tggatcagctatccagcgactgt

SEQ ID NO: 803 - RNA, 23 nt, synthetic construct
  source 1..23: mol_type = other RNA
taggatcagctatccagcgactg

SEQ ID NO: 804 - RNA, 23 nt, synthetic construct
  source 1..23: mol_type = other RNA
taaggatcagctatccagcgact

SEQ ID NO: 805 - RNA, 23 nt, synthetic construct
  source 1..23: mol_type = other RNA
tgttttataacctcaacttttct

SEQ ID NO: 806 - RNA, 23 nt, synthetic construct
  source 1..23: mol_type = other RNA
tggttttataacctcaacttttc

SEQ ID NO: 807 - RNA, 23 nt, synthetic construct
  source 1..23: mol_type = other RNA
tcagggatgggcatatatccaat

SEQ ID NO: 808 - RNA, 23 nt, synthetic construct
  source 1..23: mol_type = other RNA
tacagggatgggcatatatccaa

SEQ ID NO: 809 - RNA, 23 nt, synthetic construct
  source 1..23: mol_type = other RNA
tcaacagggatgggcatatatcc

SEQ ID NO: 810 - RNA, 23 nt, synthetic construct
  source 1..23: mol_type = other RNA
tccaacagggatgggcatatatc

SEQ ID NO: 811 - RNA, 23 nt, synthetic construct
  source 1..23: mol_type = other RNA
ttccaacagggatgggcatatat

SEQ ID NO: 812 - RNA, 23 nt, synthetic construct
  source 1..23: mol_type = other RNA
tctccaacagggatgggcatata

SEQ ID NO: 813 - RNA, 23 nt, synthetic construct
  source 1..23: mol_type = other RNA
tcggctgctggcacctccaccaa

SEQ ID NO: 814 - RNA, 23 nt, synthetic construct
  source 1..23: mol_type = other RNA
tgtcatcccatctgcaaggactc

SEQ ID NO: 815 - RNA, 23 nt, synthetic construct
  source 1..23: mol_type = other RNA
tagtcatcccatctgcaaggact

SEQ ID NO: 816 - RNA, 23 nt, synthetic construct
  source 1..23: mol_type = other RNA
tcgagtcatcccatctgcaagga

SEQ ID NO: 817 - RNA, 23 nt, synthetic construct
  source 1..23: mol_type = other RNA
tacaagcacgtggaagacgcaca

SEQ ID NO: 818 - RNA, 23 nt, synthetic construct
  source 1..23: mol_type = other RNA
tcacaagcacgtggaagacgcac

SEQ ID NO: 819 - RNA, 23 nt, synthetic construct
  source 1..23: mol_type = other RNA
tgtcacaagcacgtggaagacgc

SEQ ID NO: 820 - RNA, 23 nt, synthetic construct
  source 1..23: mol_type = other RNA
ttgcagagtcacaagcacgtgga

SEQ ID NO: 821 - RNA, 23 nt, synthetic construct
  source 1..23: mol_type = other RNA
tcttctgcagagtcacaagcacg

SEQ ID NO: 822 - RNA, 23 nt, synthetic construct
  source 1..23: mol_type = other RNA
tggactggaaacggatataaagg

SEQ ID NO: 823 - RNA, 23 nt, synthetic construct
  source 1..23: mol_type = other RNA
ttggactggaaacggatataaag

SEQ ID NO: 824 - RNA, 23 nt, synthetic construct
  source 1..23: mol_type = other RNA
tcctggactggaaacggatataa

SEQ ID NO: 825 - RNA, 23 nt, synthetic construct
  source 1..23: mol_type = other RNA
ttatgctcccagccatggcagag

SEQ ID NO: 826 - RNA, 23 nt, synthetic construct
  source 1..23: mol_type = other RNA
tctatgctcccagccatggcaga

SEQ ID NO: 827 - RNA, 23 nt, synthetic construct
  source 1..23: mol_type = other RNA
tcctatgctcccagccatggcag

SEQ ID NO: 828 - RNA, 23 nt, synthetic construct
  source 1..23: mol_type = other RNA
tcattctgtgctgcatcctgtcc

SEQ ID NO: 829 - RNA, 23 nt, synthetic construct
  source 1..23: mol_type = other RNA
tagtaatacagtttgaactacca

SEQ ID NO: 830 - RNA, 23 nt, synthetic construct
  source 1..23: mol_type = other RNA
ttaaagtaatacagtttgaacta

SEQ ID NO: 831 - RNA, 23 nt, synthetic construct
  source 1..23: mol_type = other RNA
tttaaagtaatacagtttgaact

SEQ ID NO: 832 - RNA, 23 nt, synthetic construct
  source 1..23: mol_type = other RNA
tattaaagtaatacagtttgaac

SEQ ID NO: 833 - RNA, 23 nt, synthetic construct
  source 1..23: mol_type = other RNA
ttccattaaagtaatacagtttg

SEQ ID NO: 834 - RNA, 23 nt, synthetic construct
  source 1..23: mol_type = other RNA
tttccattaaagtaatacagttt

SEQ ID NO: 835 - RNA, 23 nt, synthetic construct
  source 1..23: mol_type = other RNA
tcttccattaaagtaatacagtt

SEQ ID NO: 836 - RNA, 23 nt, synthetic construct
  source 1..23: mol_type = other RNA
tgcttccattaaagtaatacagt

SEQ ID NO: 837 - RNA, 23 nt, synthetic construct
  source 1..23: mol_type = other RNA
tatggtgcagctgatatataaat

SEQ ID NO: 838 - RNA, 23 nt, synthetic construct
  source 1..23: mol_type = other RNA
tcatggtgcagctgatatataaa

SEQ ID NO: 839 - RNA, 23 nt, synthetic construct
  source 1..23: mol_type = other RNA
tgcatggtgcagctgatatataa

SEQ ID NO: 840 - RNA, 23 nt, synthetic construct
  source 1..23: mol_type = other RNA
tggcatggtgcagctgatatata

SEQ ID NO: 841 - RNA, 23 nt, synthetic construct
  source 1..23: mol_type = other RNA
ttggcatggtgcagctgatatat

SEQ ID NO: 842 - RNA, 23 nt, synthetic construct
  source 1..23: mol_type = other RNA
tgatggcatggtgcagctgatat

SEQ ID NO: 843 - RNA, 23 nt, synthetic construct
  source 1..23: mol_type = other RNA
tgaacacctagcatctgcaaaca

SEQ ID NO: 844 - RNA, 23 nt, synthetic construct
  source 1..23: mol_type = other RNA
tttgaacacctagcatctgcaaa

SEQ ID NO: 845 - RNA, 23 nt, synthetic construct
  source 1..23: mol_type = other RNA
tcttgaacacctagcatctgcaa

SEQ ID NO: 846 - RNA, 23 nt, synthetic construct
  source 1..23: mol_type = other RNA
tccttgaacacctagcatctgca

SEQ ID NO: 847 - RNA, 23 nt, synthetic construct
  source 1..23: mol_type = other RNA
ttccttgaacacctagcatctgc

SEQ ID NO: 848 - RNA, 23 nt, synthetic construct
  source 1..23: mol_type = other RNA
tatgctccttgaacacctagcat

SEQ ID NO: 849 - RNA, 23 nt, synthetic construct
  source 1..23: mol_type = other RNA
tgcatgctccttgaacacctagc

SEQ ID NO: 850 - RNA, 23 nt, synthetic construct
  source 1..23: mol_type = other RNA
ttgcatgctccttgaacacctag

SEQ ID NO: 851 - RNA, 23 nt, synthetic construct
  source 1..23: mol_type = other RNA
tttgcatgctccttgaacaccta

SEQ ID NO: 852 - RNA, 23 nt, synthetic construct
  source 1..23: mol_type = other RNA
tctttgcatgctccttgaacacc

SEQ ID NO: 853 - RNA, 23 nt, synthetic construct
  source 1..23: mol_type = other RNA
ttctttgcatgctccttgaacac

SEQ ID NO: 854 - RNA, 23 nt, synthetic construct
  source 1..23: mol_type = other RNA
taattcgggcaagctgccgggca

SEQ ID NO: 855 - RNA, 23 nt, synthetic construct
  source 1..23: mol_type = other RNA
tacaattcgggcaagctgccggg

SEQ ID NO: 856 - RNA, 23 nt, synthetic construct
  source 1..23: mol_type = other RNA
taagatgtcctgctgccaatgct

SEQ ID NO: 857 - RNA, 23 nt, synthetic construct
  source 1..23: mol_type = other RNA
tcaagatgtcctgctgccaatgc

SEQ ID NO: 858 - RNA, 23 nt, synthetic construct
  source 1..23: mol_type = other RNA
tgacaagatgtcctgctgccaat

SEQ ID NO: 859 - RNA, 23 nt, synthetic construct
  source 1..23: mol_type = other RNA
taaggcctctctgaacaaatagc

SEQ ID NO: 860 - RNA, 23 nt, synthetic construct
  source 1..23: mol_type = other RNA
tagctctgatatctttagtaaag

SEQ ID NO: 861 - RNA, 23 nt, synthetic construct
  source 1..23: mol_type = other RNA
tttacaacatatacagatttgat

SEQ ID NO: 862 - RNA, 23 nt, synthetic construct
  source 1..23: mol_type = other RNA
tattacaacatatacagatttga

SEQ ID NO: 863 - RNA, 23 nt, synthetic construct
  source 1..23: mol_type = other RNA
tctagagtattttatcagtacac

SEQ ID NO: 864 - RNA, 23 nt, synthetic construct
  source 1..23: mol_type = other RNA
tagccagggtttcctggacaaca

SEQ ID NO: 865 - RNA, 23 nt, synthetic construct
  source 1..23: mol_type = other RNA
tgcaagccagggtttcctggaca

SEQ ID NO: 866 - RNA, 23 nt, synthetic construct
  source 1..23: mol_type = other RNA
ttcagagtccatcttctacaaga

SEQ ID NO: 867 - RNA, 23 nt, synthetic construct
  source 1..23: mol_type = other RNA
tttcagagtccatcttctacaag

SEQ ID NO: 868 - RNA, 23 nt, synthetic construct
  source 1..23: mol_type = other RNA
tagtaattgtacaaaacattaat

SEQ ID NO: 869 - RNA, 23 nt, synthetic construct
  source 1..23: mol_type = other RNA
tattctataacaaaatgtataca

SEQ ID NO: 870 - RNA, 23 nt, synthetic construct
  source 1..23: mol_type = other RNA
tgtattctataacaaaatgtata

SEQ ID NO: 871 - RNA, 23 nt, synthetic construct
  source 1..23: mol_type = other RNA
tagtattctataacaaaatgtat

SEQ ID NO: 872 - RNA, 23 nt, synthetic construct
  source 1..23: mol_type = other RNA
taaaaagtcttgacaacattgta

SEQ ID NO: 873 - RNA, 23 nt, synthetic construct
  source 1..23: mol_type = other RNA
tgaaaaagtcttgacaacattgt

SEQ ID NO: 874 - RNA, 23 nt, synthetic construct
  source 1..23: mol_type = other RNA
tcgaaaaagtcttgacaacattg

SEQ ID NO: 875 - RNA, 23 nt, synthetic construct
  source 1..23: mol_type = other RNA
tgttcatggacatcatgcagatg

SEQ ID NO: 876 - RNA, 23 nt, synthetic construct
  source 1..23: mol_type = other RNA
ttgttcatggacatcatgcagat

SEQ ID NO: 877 - RNA, 23 nt, synthetic construct
  source 1..23: mol_type = other RNA
taattccaaccacagatcttatt

SEQ ID NO: 878 - RNA, 23 nt, synthetic construct
  source 1..23: mol_type = other RNA
ttaattccaaccacagatcttat

SEQ ID NO: 879 - RNA, 23 nt, synthetic construct
  source 1..23: mol_type = other RNA
tataattccaaccacagatctta

SEQ ID NO: 880 - RNA, 23 nt, synthetic construct
  source 1..23: mol_type = other RNA
tgaactggaagtaaatatacagg

SEQ ID NO: 881 - RNA, 23 nt, synthetic construct
  source 1..23: mol_type = other RNA
tggaactggaagtaaatatacag

SEQ ID NO: 882 - RNA, 23 nt, synthetic construct
  source 1..23: mol_type = other RNA
ttggaactggaagtaaatataca

SEQ ID NO: 883 - RNA, 23 nt, synthetic construct
  source 1..23: mol_type = other RNA
tattctggaactggaagtaaata

SEQ ID NO: 884 - RNA, 23 nt, synthetic construct
  source 1..23: mol_type = other RNA
tggccagcaatacccaaaatata

SEQ ID NO: 885 - RNA, 23 nt, synthetic construct
  source 1..23: mol_type = other RNA
taatgacaactgtactgaataca

SEQ ID NO: 886 - RNA, 23 nt, synthetic construct
  source 1..23: mol_type = other RNA
tgaatgacaactgtactgaatac

SEQ ID NO: 887 - RNA, 23 nt, synthetic construct
  source 1..23: mol_type = other RNA
tagcctgtcaattctttgtctaa

SEQ ID NO: 888 - RNA, 23 nt, synthetic construct
  source 1..23: mol_type = other RNA
taagcctgtcaattctttgtcta

SEQ ID NO: 889 - RNA, 23 nt, synthetic construct
  source 1..23: mol_type = other RNA
tgggcaaagcttcattcaagcct

SEQ ID NO: 890 - RNA, 23 nt, synthetic construct
  source 1..23: mol_type = other RNA
tagggcaaagcttcattcaagcc

SEQ ID NO: 891 - RNA, 23 nt, synthetic construct
  source 1..23: mol_type = other RNA
taagggcaaagcttcattcaagc

SEQ ID NO: 892 - RNA, 23 nt, synthetic construct
  source 1..23: mol_type = other RNA
tgaaaaagggcaaagcttcattc

SEQ ID NO: 893 - RNA, 23 nt, synthetic construct
  source 1..23: mol_type = other RNA
tggaactgagggcaaactttgct

SEQ ID NO: 894 - RNA, 23 nt, synthetic construct
  source 1..23: mol_type = other RNA
tttggaactgagggcaaactttg

SEQ ID NO: 895 - RNA, 23 nt, synthetic construct
  source 1..23: mol_type = other RNA
tttacttcatcctgtgagttgga

SEQ ID NO: 896 - RNA, 23 nt, synthetic construct
  source 1..23: mol_type = other RNA
tcttacttcatcctgtgagttgg

SEQ ID NO: 897 - RNA, 23 nt, synthetic construct
  source 1..23: mol_type = other RNA
tgcaatattttcccttacttcat

SEQ ID NO: 898 - RNA, 23 nt, synthetic construct
  source 1..23: mol_type = other RNA
tagcaatattttcccttacttca

SEQ ID NO: 899 - RNA, 23 nt, synthetic construct
  source 1..23: mol_type = other RNA
tcgagcaatattttcccttactt

SEQ ID NO: 900 - RNA, 23 nt, synthetic construct
  source 1..23: mol_type = other RNA
tcacgagcaatattttcccttac

SEQ ID NO: 901 - RNA, 23 nt, synthetic construct
  source 1..23: mol_type = other RNA
tccacgagcaatattttccctta

SEQ ID NO: 902 - RNA, 23 nt, synthetic construct
  source 1..23: mol_type = other RNA
ttccacgagcaatattttccctt

SEQ ID NO: 903 - RNA, 23 nt, synthetic construct
  source 1..23: mol_type = other RNA
tttccacgagcaatattttccct

SEQ ID NO: 904 - RNA, 23 nt, synthetic construct
  source 1..23: mol_type = other RNA
tccattccacgagcaatattttc

SEQ ID NO: 905 - RNA, 23 nt, synthetic construct
  source 1..23: mol_type = other RNA
tgccattccacgagcaatatttt

SEQ ID NO: 906 - RNA, 23 nt, synthetic construct
  source 1..23: mol_type = other RNA
ttgccattccacgagcaatattt

SEQ ID NO: 907 - RNA, 23 nt, synthetic construct
  source 1..23: mol_type = other RNA
tttgccattccacgagcaatatt

SEQ ID NO: 908 - RNA, 23 nt, synthetic construct
  source 1..23: mol_type = other RNA
tattgccattccacgagcaatat

SEQ ID NO: 909 - RNA, 23 nt, synthetic construct
  source 1..23: mol_type = other RNA
taattgccattccacgagcaata

SEQ ID NO: 910 - RNA, 23 nt, synthetic construct
  source 1..23: mol_type = other RNA
ttccaatcacaagacattcaaca

SEQ ID NO: 911 - RNA, 23 nt, synthetic construct
  source 1..23: mol_type = other RNA
tctccaatcacaagacattcaac

SEQ ID NO: 912 - RNA, 23 nt, synthetic construct
  source 1..23: mol_type = other RNA
ttaccaactccaatcacaagaca

SEQ ID NO: 913 - RNA, 23 nt, synthetic construct
  source 1..23: mol_type = other RNA
tgtaccaactccaatcacaagac

SEQ ID NO: 914 - RNA, 23 nt, synthetic construct
  source 1..23: mol_type = other RNA
tggtaccaactccaatcacaaga

SEQ ID NO: 915 - RNA, 23 nt, synthetic construct
  source 1..23: mol_type = other RNA
tatggtaccaactccaatcacaa

SEQ ID NO: 916 - RNA, 23 nt, synthetic construct
  source 1..23: mol_type = other RNA
tacatggtaccaactccaatcac

SEQ ID NO: 917 - RNA, 23 nt, synthetic construct
  source 1..23: mol_type = other RNA
tgacatggtaccaactccaatca

SEQ ID NO: 918 - RNA, 23 nt, synthetic construct
  source 1..23: mol_type = other RNA
tctgacatggtaccaactccaat

SEQ ID NO: 919 - RNA, 23 nt, synthetic construct
  source 1..23: mol_type = other RNA
tcctgacatggtaccaactccaa

SEQ ID NO: 920 - RNA, 23 nt, synthetic construct
  source 1..23: mol_type = other RNA
ttgcagccaaagcagcacataat

SEQ ID NO: 921 - RNA, 23 nt, synthetic construct
  source 1..23: mol_type = other RNA
tgaacacgaagtagttggcaaga

SEQ ID NO: 922 - RNA, 23 nt, synthetic construct
  source 1..23: mol_type = other RNA
ttgaacacgaagtagttggcaag

SEQ ID NO: 923 - RNA, 23 nt, synthetic construct
  source 1..23: mol_type = other RNA
tatgaacacgaagtagttggcaa

SEQ ID NO: 924 - RNA, 23 nt, synthetic construct
  source 1..23: mol_type = other RNA
tcatgaacacgaagtagttggca

SEQ ID NO: 925 - RNA, 23 nt, synthetic construct
  source 1..23: mol_type = other RNA
tgtcatgaacacgaagtagttgg

SEQ ID NO: 926 - RNA, 23 nt, synthetic construct
  source 1..23: mol_type = other RNA
ttttcccgagaaagctctaatac

SEQ ID NO: 927 - RNA, 23 nt, synthetic construct
  source 1..23: mol_type = other RNA
tctttcccgagaaagctctaata

SEQ ID NO: 928 - RNA, 23 nt, synthetic construct
  source 1..23: mol_type = other RNA
tgctttcccgagaaagctctaat

SEQ ID NO: 929 - RNA, 23 nt, synthetic construct
  source 1..23: mol_type = other RNA
tcggctttcccgagaaagctcta

SEQ ID NO: 930 - RNA, 23 nt, synthetic construct
  source 1..23: mol_type = other RNA
tacgaccctcgcggctttcccga

SEQ ID NO: 931 - RNA, 23 nt, synthetic construct
  source 1..23: mol_type = other RNA
tgacgaccctcgcggctttcccg

SEQ ID NO: 932 - RNA, 23 nt, synthetic construct
  source 1..23: mol_type = other RNA
tggacgaccctcgcggctttccc

SEQ ID NO: 933 - RNA, 23 nt, synthetic construct
  source 1..23: mol_type = other RNA
ttggacgaccctcgcggctttcc

SEQ ID NO: 934 - RNA, 23 nt, synthetic construct
  source 1..23: mol_type = other RNA
tttggacgaccctcgcggctttc

SEQ ID NO: 935 - RNA, 23 nt, synthetic construct
  source 1..23: mol_type = other RNA
tattggacgaccctcgcggcttt

SEQ ID NO: 936 - RNA, 23 nt, synthetic construct
  source 1..23: mol_type = other RNA
taattggacgaccctcgcggctt

SEQ ID NO: 937 - RNA, 23 nt, synthetic construct
  source 1..23: mol_type = other RNA
taaattggacgaccctcgcggct

SEQ ID NO: 938 - RNA, 23 nt, synthetic construct
  source 1..23: mol_type = other RNA
tcaaattggacgaccctcgcggc

SEQ ID NO: 939 - RNA, 23 nt, synthetic construct
  source 1..23: mol_type = other RNA
tttcttcttctaaaactcgggca

SEQ ID NO: 940 - RNA, 23 nt, synthetic construct
  source 1..23: mol_type = other RNA
taatcatcttgaccctctgagtt

SEQ ID NO: 941 - RNA, 23 nt, synthetic construct
  source 1..23: mol_type = other RNA
tgagacataatcatcttgaccct

SEQ ID NO: 942 - RNA, 23 nt, synthetic construct
  source 1..23: mol_type = other RNA
tagagacataatcatcttgaccc

SEQ ID NO: 943 - RNA, 23 nt, synthetic construct
  source 1..23: mol_type = other RNA
tctagagacataatcatcttgac

SEQ ID NO: 944 - RNA, 23 nt, synthetic construct
  source 1..23: mol_type = other RNA
tcctagagacataatcatcttga

SEQ ID NO: 945 - RNA, 23 nt, synthetic construct
  source 1..23: mol_type = other RNA
tgcctagagacataatcatcttg

SEQ ID NO: 946 - RNA, 23 nt, synthetic construct
  source 1..23: mol_type = other RNA
tagcctagagacataatcatctt

SEQ ID NO: 947 - RNA, 23 nt, synthetic construct
  source 1..23: mol_type = other RNA
taagcctagagacataatcatct

SEQ ID NO: 948 - RNA, 23 nt, synthetic construct
  source 1..23: mol_type = other RNA
tcaagcctagagacataatcatc

SEQ ID NO: 949 - RNA, 23 nt, synthetic construct
  source 1..23: mol_type = other RNA
ttatccagcgactgtgagcatga

SEQ ID NO: 950 - RNA, 23 nt, synthetic construct
  source 1..23: mol_type = other RNA
tctatccagcgactgtgagcatg

SEQ ID NO: 951 - RNA, 23 nt, synthetic construct
  source 1..23: mol_type = other RNA
tgctatccagcgactgtgagcat

SEQ ID NO: 952 - RNA, 23 nt, synthetic construct
  source 1..23: mol_type = other RNA
tagctatccagcgactgtgagca

SEQ ID NO: 953 - RNA, 23 nt, synthetic construct
  source 1..23: mol_type = other RNA
tcagctatccagcgactgtgagc

SEQ ID NO: 954 - RNA, 23 nt, synthetic construct
  source 1..23: mol_type = other RNA
ttcagctatccagcgactgtgag

SEQ ID NO: 955 - RNA, 23 nt, synthetic construct
  source 1..23: mol_type = other RNA
tggaaacacttggttcaattctc

SEQ ID NO: 956 - RNA, 23 nt, synthetic construct
  source 1..23: mol_type = other RNA
tcagagggaaacacttggttcaa

SEQ ID NO: 957 - RNA, 23 nt, synthetic construct
  source 1..23: mol_type = other RNA
taatatccatgctgatcatttta

SEQ ID NO: 958 - RNA, 23 nt, synthetic construct
  source 1..23: mol_type = other RNA
ttcaatatccatgctgatcattt

SEQ ID NO: 959 - RNA, 23 nt, synthetic construct
  source 1..23: mol_type = other RNA
tacttgacagccagaaggagagc

SEQ ID NO: 960 - RNA, 23 nt, synthetic construct
  source 1..23: mol_type = other RNA
ttacttgacagccagaaggagag

SEQ ID NO: 961 - RNA, 23 nt, synthetic construct
  source 1..23: mol_type = other RNA
tgtgtagattctgtctctgtttg

SEQ ID NO: 962 - RNA, 23 nt, synthetic construct
  source 1..23: mol_type = other RNA
tagtgtagattctgtctctgttt

SEQ ID NO: 963 - RNA, 23 nt, synthetic construct
  source 1..23: mol_type = other RNA
taggttcacgtctacaacaattg

SEQ ID NO: 964 - RNA, 23 nt, synthetic construct
  source 1..23: mol_type = other RNA
tgggttttataacctcaactttt

SEQ ID NO: 965 - RNA, 23 nt, synthetic construct
  source 1..23: mol_type = other RNA
taagggttttataacctcaactt

SEQ ID NO: 966 - RNA, 23 nt, synthetic construct
  source 1..23: mol_type = other RNA
ttaagggttttataacctcaact

SEQ ID NO: 967 - RNA, 23 nt, synthetic construct
  source 1..23: mol_type = other RNA
tctaagggttttataacctcaac

SEQ ID NO: 968 - RNA, 23 nt, synthetic construct
  source 1..23: mol_type = other RNA
taattttgcacctttctctgcat

SEQ ID NO: 969 - RNA, 23 nt, synthetic construct
  source 1..23: mol_type = other RNA
tgaattttgcacctttctctgca

SEQ ID NO: 970 - RNA, 23 nt, synthetic construct
  source 1..23: mol_type = other RNA
tggaattttgcacctttctctgc

SEQ ID NO: 971 - RNA, 23 nt, synthetic construct
  source 1..23: mol_type = other RNA
taggaattttgcacctttctctg

SEQ ID NO: 972 - RNA, 23 nt, synthetic construct
  source 1..23: mol_type = other RNA
taaggaattttgcacctttctct

SEQ ID NO: 973 - RNA, 23 nt, synthetic construct
  source 1..23: mol_type = other RNA
ttaaggaattttgcacctttctc

SEQ ID NO: 974 - RNA, 23 nt, synthetic construct
  source 1..23: mol_type = other RNA
tctaaggaattttgcacctttct

SEQ ID NO: 975 - RNA, 23 nt, synthetic construct
  source 1..23: mol_type = other RNA
tactaaggaattttgcacctttc

SEQ ID NO: 976 - RNA, 23 nt, synthetic construct
  source 1..23: mol_type = other RNA
tcactaaggaattttgcaccttt

SEQ ID NO: 977 - RNA, 23 nt, synthetic construct
  source 1..23: mol_type = other RNA
tcatcactaaggaattttgcacc

SEQ ID NO: 978 - RNA, 23 nt, synthetic construct
  source 1..23: mol_type = other RNA
tgcatcactaaggaattttgcac

SEQ ID NO: 979 - RNA, 23 nt, synthetic construct
  source 1..23: mol_type = other RNA
tctcagcatcactaaggaatttt

SEQ ID NO: 980 - RNA, 23 nt, synthetic construct
  source 1..23: mol_type = other RNA
tgatctcagcatcactaaggaat

SEQ ID NO: 981 - RNA, 23 nt, synthetic construct
  source 1..23: mol_type = other RNA
ttgatctcagcatcactaaggaa

SEQ ID NO: 982 - RNA, 23 nt, synthetic construct
  source 1..23: mol_type = other RNA
tgactaactggatgatctcagca

SEQ ID NO: 983 - RNA, 23 nt, synthetic construct
  source 1..23: mol_type = other RNA
ttgactaactggatgatctcagc

SEQ ID NO: 984 - RNA, 23 nt, synthetic construct
  source 1..23: mol_type = other RNA
tttgactaactggatgatctcag

SEQ ID NO: 985 - RNA, 23 nt, synthetic construct
  source 1..23: mol_type = other RNA
tgcattgactaactggatgatct

SEQ ID NO: 986 - RNA, 23 nt, synthetic construct
  source 1..23: mol_type = other RNA
tgggatatgcttagcattgacta

SEQ ID NO: 987 - RNA, 23 nt, synthetic construct
  source 1..23: mol_type = other RNA
tgtaggctgggatatgcttagca

SEQ ID NO: 988 - RNA, 23 nt, synthetic construct
  source 1..23: mol_type = other RNA
tttgtaggctgggatatgcttag

SEQ ID NO: 989 - RNA, 23 nt, synthetic construct
  source 1..23: mol_type = other RNA
tagtttccatcagagtttccaac

SEQ ID NO: 990 - RNA, 23 nt, synthetic construct
  source 1..23: mol_type = other RNA
tgagtttccatcagagtttccaa

SEQ ID NO: 991 - RNA, 23 nt, synthetic construct
  source 1..23: mol_type = other RNA
ttgagtttccatcagagtttcca

SEQ ID NO: 992 - RNA, 23 nt, synthetic construct
  source 1..23: mol_type = other RNA
tatgagtttccatcagagtttcc

SEQ ID NO: 993 - RNA, 23 nt, synthetic construct
  source 1..23: mol_type = other RNA
tcacgctcatgagtttccatcag

SEQ ID NO: 994 - RNA, 23 nt, synthetic construct
  source 1..23: mol_type = other RNA
tccacgctcatgagtttccatca

SEQ ID NO: 995 - RNA, 23 nt, synthetic construct
  source 1..23: mol_type = other RNA
taccacgctcatgagtttccatc

SEQ ID NO: 996 - RNA, 23 nt, synthetic construct
  source 1..23: mol_type = other RNA
tcaccacgctcatgagtttccat

SEQ ID NO: 997 - RNA, 23 nt, synthetic construct
  source 1..23: mol_type = other RNA
tacaccacgctcatgagtttcca

SEQ ID NO: 998 - RNA, 23 nt, synthetic construct
  source 1..23: mol_type = other RNA
tgcgaatagatacaccacgctca

SEQ ID NO: 999 - RNA, 23 nt, synthetic construct
  source 1..23: mol_type = other RNA
tattataatccctgtaaggtagg

SEQ ID NO: 1000 - RNA, 23 nt, synthetic construct
  source 1..23: mol_type = other RNA
taattataatccctgtaaggtag

SEQ ID NO: 1001 - RNA, 23 nt, synthetic construct
  source 1..23: mol_type = other RNA
tcaaggagtaattataatccctg

SEQ ID NO: 1002 - RNA, 23 nt, synthetic construct
  source 1..23: mol_type = other RNA
tccaaggagtaattataatccct

SEQ ID NO: 1003 - RNA, 23 nt, synthetic construct
  source 1..23: mol_type = other RNA
taccaaggagtaattataatccc

SEQ ID NO: 1004 - RNA, 23 nt, synthetic construct
  source 1..23: mol_type = other RNA
tcaccaaggagtaattataatcc

SEQ ID NO: 1005 - RNA, 23 nt, synthetic construct
  source 1..23: mol_type = other RNA
tcccatcaccaaggagtaattat

SEQ ID NO: 1006 - RNA, 23 nt, synthetic construct
  source 1..23: mol_type = other RNA
ttcccatcaccaaggagtaatta

SEQ ID NO: 1007 - RNA, 23 nt, synthetic construct
  source 1..23: mol_type = other RNA
tacaagctcccatcaccaaggag

SEQ ID NO: 1008 - RNA, 23 nt, synthetic construct
  source 1..23: mol_type = other RNA
tacaacaagctcccatcaccaag

SEQ ID NO: 1009 - RNA, 23 nt, synthetic construct
  source 1..23: mol_type = other RNA
tggatgggcatatatccaataac

SEQ ID NO: 1010 - RNA, 23 nt, synthetic construct
  source 1..23: mol_type = other RNA
tgggatgggcatatatccaataa

SEQ ID NO: 1011 - RNA, 23 nt, synthetic construct
  source 1..23: mol_type = other RNA
tggccacaagacaaccttctgtt

SEQ ID NO: 1012 - RNA, 23 nt, synthetic construct
  source 1..23: mol_type = other RNA
ttgctggccacaagacaaccttc

SEQ ID NO: 1013 - RNA, 23 nt, synthetic construct
  source 1..23: mol_type = other RNA
ttggtgctggccacaagacaacc

SEQ ID NO: 1014 - RNA, 23 nt, synthetic construct
  source 1..23: mol_type = other RNA
tttggtgctggccacaagacaac

SEQ ID NO: 1015 - RNA, 23 nt, synthetic construct
  source 1..23: mol_type = other RNA
ttggcacctccaccaagacctat

SEQ ID NO: 1016 - RNA, 23 nt, synthetic construct
  source 1..23: mol_type = other RNA
tctggcacctccaccaagaccta

SEQ ID NO: 1017 - RNA, 23 nt, synthetic construct
  source 1..23: mol_type = other RNA
ttcggctgctggcacctccacca

SEQ ID NO: 1018 - RNA, 23 nt, synthetic construct
  source 1..23: mol_type = other RNA
taaggactcggctgctggcacct

SEQ ID NO: 1019 - RNA, 23 nt, synthetic construct
  source 1..23: mol_type = other RNA
tctgcaaggactcggctgctggc

SEQ ID NO: 1020 - RNA, 23 nt, synthetic construct
  source 1..23: mol_type = other RNA
ttctgcaaggactcggctgctgg

SEQ ID NO: 1021 - RNA, 23 nt, synthetic construct
  source 1..23: mol_type = other RNA
tatctgcaaggactcggctgctg

SEQ ID NO: 1022 - RNA, 23 nt, synthetic construct
  source 1..23: mol_type = other RNA
tcatctgcaaggactcggctgct

SEQ ID NO: 1023 - RNA, 23 nt, synthetic construct
  source 1..23: mol_type = other RNA
tcccatctgcaaggactcggctg

SEQ ID NO: 1024 - RNA, 23 nt, synthetic construct
  source 1..23: mol_type = other RNA
tatcccatctgcaaggactcggc

SEQ ID NO: 1025 - RNA, 23 nt, synthetic construct
  source 1..23: mol_type = other RNA
tacgagtcatcccatctgcaagg

SEQ ID NO: 1026 - RNA, 23 nt, synthetic construct
  source 1..23: mol_type = other RNA
tcacgagtcatcccatctgcaag

SEQ ID NO: 1027 - RNA, 23 nt, synthetic construct
  source 1..23: mol_type = other RNA
tccacgagtcatcccatctgcaa

SEQ ID NO: 1028 - RNA, 23 nt, synthetic construct
  source 1..23: mol_type = other RNA
tgccacgagtcatcccatctgca

SEQ ID NO: 1029 - RNA, 23 nt, synthetic construct
  source 1..23: mol_type = other RNA
tggccacgagtcatcccatctgc

SEQ ID NO: 1030 - RNA, 23 nt, synthetic construct
  source 1..23: mol_type = other RNA
tgggccacgagtcatcccatctg

SEQ ID NO: 1031 - RNA, 23 nt, synthetic construct
  source 1..23: mol_type = other RNA
ttgggccacgagtcatcccatct

SEQ ID NO: 1032 - RNA, 23 nt, synthetic construct
  source 1..23: mol_type = other RNA
tctgggccacgagtcatcccatc

SEQ ID NO: 1033 - RNA, 23 nt, synthetic construct
  source 1..23: mol_type = other RNA
tactgggccacgagtcatcccat

SEQ ID NO: 1034 - RNA, 23 nt, synthetic construct
  source 1..23: mol_type = other RNA
taagacgcacaactgggccacga

SEQ ID NO: 1035 - RNA, 23 nt, synthetic construct
  source 1..23: mol_type = other RNA
tgaagacgcacaactgggccacg

SEQ ID NO: 1036 - RNA, 23 nt, synthetic construct
  source 1..23: mol_type = other RNA
ttggaagacgcacaactgggcca

SEQ ID NO: 1037 - RNA, 23 nt, synthetic construct
  source 1..23: mol_type = other RNA
tgtggaagacgcacaactgggcc

SEQ ID NO: 1038 - RNA, 23 nt, synthetic construct
  source 1..23: mol_type = other RNA
tcgtggaagacgcacaactgggc

SEQ ID NO: 1039 - RNA, 23 nt, synthetic construct
  source 1..23: mol_type = other RNA
tacgtggaagacgcacaactggg

SEQ ID NO: 1040 - RNA, 23 nt, synthetic construct
  source 1..23: mol_type = other RNA
tcacgtggaagacgcacaactgg

SEQ ID NO: 1041 - RNA, 23 nt, synthetic construct
  source 1..23: mol_type = other RNA
ttcacttctgcagagtcacaagc

SEQ ID NO: 1042 - RNA, 23 nt, synthetic construct
  source 1..23: mol_type = other RNA
ttatcactgcgaacccttcagat

SEQ ID NO: 1043 - RNA, 23 nt, synthetic construct
  source 1..23: mol_type = other RNA
tttatcactgcgaacccttcaga

SEQ ID NO: 1044 - RNA, 23 nt, synthetic construct
  source 1..23: mol_type = other RNA
ttttatcactgcgaacccttcag

SEQ ID NO: 1045 - RNA, 23 nt, synthetic construct
  source 1..23: mol_type = other RNA
tcctttatcactgcgaacccttc

SEQ ID NO: 1046 - RNA, 23 nt, synthetic construct
  source 1..23: mol_type = other RNA
ttcctttatcactgcgaaccctt

SEQ ID NO: 1047 - RNA, 23 nt, synthetic construct
  source 1..23: mol_type = other RNA
tgcctcctttatcactgcgaacc

SEQ ID NO: 1048 - RNA, 23 nt, synthetic construct
  source 1..23: mol_type = other RNA
taaatgcctcctttatcactgcg

SEQ ID NO: 1049 - RNA, 23 nt, synthetic construct
  source 1..23: mol_type = other RNA
ttagacgtgcaaatctgctagtg

SEQ ID NO: 1050 - RNA, 23 nt, synthetic construct
  source 1..23: mol_type = other RNA
tgtagacgtgcaaatctgctagt

SEQ ID NO: 1051 - RNA, 23 nt, synthetic construct
  source 1..23: mol_type = other RNA
ttgtagacgtgcaaatctgctag

SEQ ID NO: 1052 - RNA, 23 nt, synthetic construct
  source 1..23: mol_type = other RNA
tctgtagacgtgcaaatctgcta

SEQ ID NO: 1053 - RNA, 23 nt, synthetic construct
  source 1..23: mol_type = other RNA
ttctgtagacgtgcaaatctgct

SEQ ID NO: 1054 - RNA, 23 nt, synthetic construct
  source 1..23: mol_type = other RNA
ttttctgtagacgtgcaaatctg

SEQ ID NO: 1055 - RNA, 23 nt, synthetic construct
  source 1..23: mol_type = other RNA
tgtttctgtagacgtgcaaatct

SEQ ID NO: 1056 - RNA, 23 nt, synthetic construct
  source 1..23: mol_type = other RNA
tgatataaaggttgcgtccagct

SEQ ID NO: 1057 - RNA, 23 nt, synthetic construct
  source 1..23: mol_type = other RNA
tggatataaaggttgcgtccagc

SEQ ID NO: 1058 - RNA, 23 nt, synthetic construct
  source 1..23: mol_type = other RNA
tcggatataaaggttgcgtccag

SEQ ID NO: 1059 - RNA, 23 nt, synthetic construct
  source 1..23: mol_type = other RNA
tacggatataaaggttgcgtcca

SEQ ID NO: 1060 - RNA, 23 nt, synthetic construct
  source 1..23: mol_type = other RNA
taaacggatataaaggttgcgtc

SEQ ID NO: 1061 - RNA, 23 nt, synthetic construct
  source 1..23: mol_type = other RNA
tgaaacggatataaaggttgcgt

SEQ ID NO: 1062 - RNA, 23 nt, synthetic construct
  source 1..23: mol_type = other RNA
tggaaacggatataaaggttgcg

SEQ ID NO: 1063 - RNA, 23 nt, synthetic construct
  source 1..23: mol_type = other RNA
tactggaaacggatataaaggtt

SEQ ID NO: 1064 - RNA, 23 nt, synthetic construct
  source 1..23: mol_type = other RNA
tgactggaaacggatataaaggt

SEQ ID NO: 1065 - RNA, 23 nt, synthetic construct
  source 1..23: mol_type = other RNA
tacctggactggaaacggatata

SEQ ID NO: 1066 - RNA, 23 nt, synthetic construct
  source 1..23: mol_type = other RNA
taatgacagcttcacaaacaaca

SEQ ID NO: 1067 - RNA, 23 nt, synthetic construct
  source 1..23: mol_type = other RNA
ttggaatgacagcttcacaaaca

SEQ ID NO: 1068 - RNA, 23 nt, synthetic construct
  source 1..23: mol_type = other RNA
tctggaatgacagcttcacaaac

SEQ ID NO: 1069 - RNA, 23 nt, synthetic construct
  source 1..23: mol_type = other RNA
tttggctggaatgacagcttcac

SEQ ID NO: 1070 - RNA, 23 nt, synthetic construct
  source 1..23: mol_type = other RNA
taccttggctggaatgacagctt

SEQ ID NO: 1071 - RNA, 23 nt, synthetic construct
  source 1..23: mol_type = other RNA
taaccttggctggaatgacagct

SEQ ID NO: 1072 - RNA, 23 nt, synthetic construct
  source 1..23: mol_type = other RNA
tcaaccttggctggaatgacagc

SEQ ID NO: 1073 - RNA, 23 nt, synthetic construct
  source 1..23: mol_type = other RNA
tacaaccttggctggaatgacag

SEQ ID NO: 1074 - RNA, 23 nt, synthetic construct
  source 1..23: mol_type = other RNA
ttagcctcctatgctcccagcca

SEQ ID NO: 1075 - RNA, 23 nt, synthetic construct
  source 1..23: mol_type = other RNA
tgtagcctcctatgctcccagcc

SEQ ID NO: 1076 - RNA, 23 nt, synthetic construct
  source 1..23: mol_type = other RNA
tttgtagcctcctatgctcccag

SEQ ID NO: 1077 - RNA, 23 nt, synthetic construct
  source 1..23: mol_type = other RNA
tgttgtagcctcctatgctccca

SEQ ID NO: 1078 - RNA, 23 nt, synthetic construct
  source 1..23: mol_type = other RNA
tgcgttgtagcctcctatgctcc

SEQ ID NO: 1079 - RNA, 23 nt, synthetic construct
  source 1..23: mol_type = other RNA
tggcgttgtagcctcctatgctc

SEQ ID NO: 1080 - RNA, 23 nt, synthetic construct
  source 1..23: mol_type = other RNA
tgggcgttgtagcctcctatgct

SEQ ID NO: 1081 - RNA, 23 nt, synthetic construct
  source 1..23: mol_type = other RNA
ttgggcgttgtagcctcctatgc

SEQ ID NO: 1082 - RNA, 23 nt, synthetic construct
  source 1..23: mol_type = other RNA
ttgcatgggcgttgtagcctcct

SEQ ID NO: 1083 - RNA, 23 nt, synthetic construct
  source 1..23: mol_type = other RNA
tgctgcatgggcgttgtagcctc

SEQ ID NO: 1084 - RNA, 23 nt, synthetic construct
  source 1..23: mol_type = other RNA
ttgctgcatgggcgttgtagcct

SEQ ID NO: 1085 - RNA, 23 nt, synthetic construct
  source 1..23: mol_type = other RNA
tttgctgcatgggcgttgtagcc

SEQ ID NO: 1086 - RNA, 23 nt, synthetic construct
  source 1..23: mol_type = other RNA
tgtttgctgcatgggcgttgtag

SEQ ID NO: 1087 - RNA, 23 nt, synthetic construct
  source 1..23: mol_type = other RNA
ttgtttgctgcatgggcgttgta

SEQ ID NO: 1088 - RNA, 23 nt, synthetic construct
  source 1..23: mol_type = other RNA
tatgtttgctgcatgggcgttgt

SEQ ID NO: 1089 - RNA, 23 nt, synthetic construct
  source 1..23: mol_type = other RNA
tgacaatgtttgctgcatgggcg

SEQ ID NO: 1090 - RNA, 23 nt, synthetic construct
  source 1..23: mol_type = other RNA
tgtgctgcatcctgtccacaggc

SEQ ID NO: 1091 - RNA, 23 nt, synthetic construct
  source 1..23: mol_type = other RNA
tcaacattctgtgctgcatcctg

SEQ ID NO: 1092 - RNA, 23 nt, synthetic construct
  source 1..23: mol_type = other RNA
taatacagtttgaactaccaaca

SEQ ID NO: 1093 - RNA, 23 nt, synthetic construct
  source 1..23: mol_type = other RNA
ttaatacagtttgaactaccaac

SEQ ID NO: 1094 - RNA, 23 nt, synthetic construct
  source 1..23: mol_type = other RNA
tgtaatacagtttgaactaccaa

SEQ ID NO: 1095 - RNA, 23 nt, synthetic construct
  source 1..23: mol_type = other RNA
ttgcttccattaaagtaatacag

SEQ ID NO: 1096 - RNA, 23 nt, synthetic construct
  source 1..23: mol_type = other RNA
tttgcttccattaaagtaataca

SEQ ID NO: 1097 - RNA, 23 nt, synthetic construct
  source 1..23: mol_type = other RNA
tacttgcttccattaaagtaata

SEQ ID NO: 1098 - RNA, 23 nt, synthetic construct
  source 1..23: mol_type = other RNA
tcacttgcttccattaaagtaat

SEQ ID NO: 1099 - RNA, 23 nt, synthetic construct
  source 1..23: mol_type = other RNA
ttaaatcttcatttgtgggacca

SEQ ID NO: 1100 - RNA, 23 nt, synthetic construct
  source 1..23: mol_type = other RNA
tgcagctgatatataaatcttca

SEQ ID NO: 1101 - RNA, 23 nt, synthetic construct
  source 1..23: mol_type = other RNA
tagatggcatggtgcagctgata

SEQ ID NO: 1102 - RNA, 23 nt, synthetic construct
  source 1..23: mol_type = other RNA
ttagatggcatggtgcagctgat

SEQ ID NO: 1103 - RNA, 23 nt, synthetic construct
  source 1..23: mol_type = other RNA
tatagatggcatggtgcagctga

SEQ ID NO: 1104 - RNA, 23 nt, synthetic construct
  source 1..23: mol_type = other RNA
ttatagatggcatggtgcagctg

SEQ ID NO: 1105 - RNA, 23 nt, synthetic construct
  source 1..23: mol_type = other RNA
tctatagatggcatggtgcagct

SEQ ID NO: 1106 - RNA, 23 nt, synthetic construct
  source 1..23: mol_type = other RNA
ttctatagatggcatggtgcagc

SEQ ID NO: 1107 - RNA, 23 nt, synthetic construct
  source 1..23: mol_type = other RNA
tctctatagatggcatggtgcag

SEQ ID NO: 1108 - RNA, 23 nt, synthetic construct
  source 1..23: mol_type = other RNA
ttctctatagatggcatggtgca

SEQ ID NO: 1109 - RNA, 23 nt, synthetic construct
  source 1..23: mol_type = other RNA
tcctatctctatagatggcatgg

SEQ ID NO: 1110 - RNA, 23 nt, synthetic construct
  source 1..23: mol_type = other RNA
tcaccgttcctatctctatagat

SEQ ID NO: 1111 - RNA, 23 nt, synthetic construct
  source 1..23: mol_type = other RNA
tccaccgttcctatctctataga

SEQ ID NO: 1112 - RNA, 23 nt, synthetic construct
  source 1..23: mol_type = other RNA
tcccaccgttcctatctctatag

SEQ ID NO: 1113 - RNA, 23 nt, synthetic construct
  source 1..23: mol_type = other RNA
tacaggcttgctgaggtagtagg

SEQ ID NO: 1114 - RNA, 23 nt, synthetic construct
  source 1..23: mol_type = other RNA
taacacctagcatctgcaaacag

SEQ ID NO: 1115 - RNA, 23 nt, synthetic construct
  source 1..23: mol_type = other RNA
tatctttgcatgctccttgaaca

SEQ ID NO: 1116 - RNA, 23 nt, synthetic construct
  source 1..23: mol_type = other RNA
ttatctttgcatgctccttgaac

SEQ ID NO: 1117 - RNA, 23 nt, synthetic construct
  source 1..23: mol_type = other RNA
tttatctttgcatgctccttgaa

SEQ ID NO: 1118 - RNA, 23 nt, synthetic construct
  source 1..23: mol_type = other RNA
tattatctttgcatgctccttga

SEQ ID NO: 1119 - RNA, 23 nt, synthetic construct
  source 1..23: mol_type = other RNA
tgattatctttgcatgctccttg

SEQ ID NO: 1120 - RNA, 23 nt, synthetic construct
  source 1..23: mol_type = other RNA
tggattatctttgcatgctcctt

SEQ ID NO: 1121 - RNA, 23 nt, synthetic construct
  source 1..23: mol_type = other RNA
tttcgggcaagctgccgggcatt

SEQ ID NO: 1122 - RNA, 23 nt, synthetic construct
  source 1..23: mol_type = other RNA
tcacaattcgggcaagctgccgg

SEQ ID NO: 1123 - RNA, 23 nt, synthetic construct
  source 1..23: mol_type = other RNA
tacacaattcgggcaagctgccg

SEQ ID NO: 1124 - RNA, 23 nt, synthetic construct
  source 1..23: mol_type = other RNA
tcacacaattcgggcaagctgcc

SEQ ID NO: 1125 - RNA, 23 nt, synthetic construct
  source 1..23: mol_type = other RNA
tgtcctgctgccaatgctgccat

SEQ ID NO: 1126 - RNA, 23 nt, synthetic construct
  source 1..23: mol_type = other RNA
ttgtcctgctgccaatgctgcca

SEQ ID NO: 1127 - RNA, 23 nt, synthetic construct
  source 1..23: mol_type = other RNA
tatgtcctgctgccaatgctgcc

SEQ ID NO: 1128 - RNA, 23 nt, synthetic construct
  source 1..23: mol_type = other RNA
ttttgacaagatgtcctgctgcc

SEQ ID NO: 1129 - RNA, 23 nt, synthetic construct
  source 1..23: mol_type = other RNA
tttttgacaagatgtcctgctgc

SEQ ID NO: 1130 - RNA, 23 nt, synthetic construct
  source 1..23: mol_type = other RNA
tacttttgacaagatgtcctgct

SEQ ID NO: 1131 - RNA, 23 nt, synthetic construct
  source 1..23: mol_type = other RNA
tgacttttgacaagatgtcctgc

SEQ ID NO: 1132 - RNA, 23 nt, synthetic construct
  source 1..23: mol_type = other RNA
ttgacttttgacaagatgtcctg

SEQ ID NO: 1133 - RNA, 23 nt, synthetic construct
  source 1..23: mol_type = other RNA
tagttctacatcccagacttaat

SEQ ID NO: 1134 - RNA, 23 nt, synthetic construct
  source 1..23: mol_type = other RNA
tggcctctctgaacaaatagcct

SEQ ID NO: 1135 - RNA, 23 nt, synthetic construct
  source 1..23: mol_type = other RNA
taggcctctctgaacaaatagcc

SEQ ID NO: 1136 - RNA, 23 nt, synthetic construct
  source 1..23: mol_type = other RNA
ttatttcttgaacacttccaata

SEQ ID NO: 1137 - RNA, 23 nt, synthetic construct
  source 1..23: mol_type = other RNA
tttatttcttgaacacttccaat

SEQ ID NO: 1138 - RNA, 23 nt, synthetic construct
  source 1..23: mol_type = other RNA
ttagagtattttatcagtacaca

SEQ ID NO: 1139 - RNA, 23 nt, synthetic construct
  source 1..23: mol_type = other RNA
tcaagcaagccagggtttcctgg

SEQ ID NO: 1140 - RNA, 23 nt, synthetic construct
  source 1..23: mol_type = other RNA
ttggccacaggaactaggcacag

SEQ ID NO: 1141 - RNA, 23 nt, synthetic construct
  source 1..23: mol_type = other RNA
taacctcctggccacaggaacta

SEQ ID NO: 1142 - RNA, 23 nt, synthetic construct
  source 1..23: mol_type = other RNA
tcaccaacctcctggccacagga

SEQ ID NO: 1143 - RNA, 23 nt, synthetic construct
  source 1..23: mol_type = other RNA
ttcagtcaccaacctcctggcca

SEQ ID NO: 1144 - RNA, 23 nt, synthetic construct
  source 1..23: mol_type = other RNA
tattaagattcaataactctgct

SEQ ID NO: 1145 - RNA, 23 nt, synthetic construct
  source 1..23: mol_type = other RNA
taattaagattcaataactctgc

SEQ ID NO: 1146 - RNA, 23 nt, synthetic construct
  source 1..23: mol_type = other RNA
taaattaagattcaataactctg

SEQ ID NO: 1147 - RNA, 23 nt, synthetic construct
  source 1..23: mol_type = other RNA
tcaaaacttgtacattaaaaaaa

SEQ ID NO: 1148 - RNA, 23 nt, synthetic construct
  source 1..23: mol_type = other RNA
ttacaaaacttgtacattaaaaa

SEQ ID NO: 1149 - RNA, 23 nt, synthetic construct
  source 1..23: mol_type = other RNA
ttaaggagttctttattatttat

SEQ ID NO: 1150 - RNA, 23 nt, synthetic construct
  source 1..23: mol_type = other RNA
tataaggagttctttattattta

SEQ ID NO: 1151 - RNA, 23 nt, synthetic construct
  source 1..23: mol_type = other RNA
taataaggagttctttattattt

SEQ ID NO: 1152 - RNA, 23 nt, synthetic construct
  source 1..23: mol_type = other RNA
taaataaggagttctttattatt

SEQ ID NO: 1153 - RNA, 23 nt, synthetic construct
  source 1..23: mol_type = other RNA
taaaataaggagttctttattat

SEQ ID NO: 1154 - RNA, 23 nt, synthetic construct
  source 1..23: mol_type = other RNA
tacacttgaagcattagatgtaa

SEQ ID NO: 1155 - RNA, 23 nt, synthetic construct
  source 1..23: mol_type = other RNA
tacttccatgaaaagctcagaaa

SEQ ID NO: 1156 - RNA, 23 nt, synthetic construct
  source 1..23: mol_type = other RNA
tccacttccatgaaaagctcaga

SEQ ID NO: 1157 - RNA, 23 nt, synthetic construct
  source 1..23: mol_type = other RNA
ttgccacttccatgaaaagctca

SEQ ID NO: 1158 - RNA, 23 nt, synthetic construct
  source 1..23: mol_type = other RNA
tttcactgccacttccatgaaaa

SEQ ID NO: 1159 - RNA, 23 nt, synthetic construct
  source 1..23: mol_type = other RNA
tgtaattgtacaaaacattaatc

SEQ ID NO: 1160 - RNA, 21 nt, synthetic construct
  source 1..21: mol_type = other RNA
  modified_base 1: mod_base = OTHER; note = 2'-O-methylguanosine with a 3'-phosphorothioate linkage
  modified_base 2: mod_base = OTHER; note = 2'-O-methylcytidine with a 3'-phosphorothioate linkage
  modified_base 3: mod_base = um
  modified_base 4: mod_base = OTHER; note = 2'-O-methyladenosine
  modified_base 5: mod_base = cm
  modified_base 6: mod_base = OTHER; note = 2'-O-methyladenosine
  modified_base 7: mod_base = OTHER; note = 2'-O-methyladenosine
  modified_base 8: mod_base = um
  modified_base 9: mod_base = OTHER; note = 2'-fluoroguanosine
  modified_base 10: mod_base = OTHER; note = 2'-fluorouridine
  modified_base 11: mod_base = OTHER; note = 2'-fluorouridine
  modified_base 12: mod_base = gm
  modified_base 13: mod_base = um
  modified_base 14: mod_base = cm
  modified_base 15: mod_base = OTHER; note = 2'-O-methyladenosine
  modified_base 16: mod_base = OTHER; note = 2'-O-methyladenosine
  modified_base 17: mod_base = gm
  modified_base 18: mod_base = OTHER; note = 2'-O-methyladenosine
  modified_base 19: mod_base = OTHER; note = 2'-O-methylcytidine with a 3'-phosphorothioate linkage
  modified_base 20: mod_base = OTHER; note = 2'-O-methyluridine with a 3'-phosphorothioate linkage
  modified_base 21: mod_base = OTHER; note = 2'-O-methyladenosine
gctacaatgttgtcaagacta

SEQ ID NO: 1161 - RNA, 23 nt, synthetic construct
  source 1..23: mol_type = other RNA
  modified_base 1: mod_base = OTHER; note = 2'-O-methyluridine with a 3'-phosphorothioate linkage and a 5'-phosphate substitution
  modified_base 2: mod_base = OTHER; note = 2'-fluoroadenosine with a 3'-phosphorothioate linkage
  modified_base 3: mod_base = gm
  modified_base 4: mod_base = um
  modified_base 5: mod_base = OTHER; note = 2'-fluorocytidine
  modified_base 6: mod_base = um
  modified_base 7: mod_base = OTHER; note = 2'-fluorouridine
  modified_base 8: mod_base = gm
  modified_base 9: mod_base = OTHER; note = 2'-O-methyladenosine
  modified_base 10: mod_base = cm
  modified_base 11: mod_base = OTHER; note = 2'-O-methyladenosine
  modified_base 12: mod_base = OTHER; note = 2'-O-methyladenosine
  modified_base 13: mod_base = cm
  modified_base 14: mod_base = OTHER; note = 2'-fluoroadenosine
  modified_base 15: mod_base = um
  modified_base 16: mod_base = OTHER; note = 2'-fluorouridine
  modified_base 17: mod_base = gm
  modified_base 18: mod_base = um
  modified_base 19: mod_base = OTHER; note = 2'-O-methyladenosine
  modified_base 20: mod_base = gm
  modified_base 21: mod_base = OTHER; note = 2'-O-methylcytidine with a 3'-phosphorothioate linkage
  modified_base 22: mod_base = OTHER; note = 2'-O-methyluridine with a 3'-phosphorothioate linkage
  modified_base 23: mod_base = OTHER; note = 2'-O-methyladenosine
tagtcttgacaacattgtagcta

SEQ ID NO: 1162 - RNA, 21 nt, synthetic construct
  source 1..21: mol_type = other RNA
  modified_base 1: mod_base = OTHER; note = 2'-O-methylcytidine with a 3'-phosphorothioate linkage
  modified_base 2: mod_base = OTHER; note = 2'-O-methyluridine with a 3'-phosphorothioate linkage
  modified_base 3: mod_base = OTHER; note = 2'-O-methyladenosine
  modified_base 4: mod_base = cm
  modified_base 5: mod_base = OTHER; note = 2'-O-methyladenosine
  modified_base 6: mod_base = OTHER; note = 2'-O-methyladenosine
  modified_base 7: mod_base = um
  modified_base 8: mod_base = gm
  modified_base 9: mod_base = OTHER; note = 2'-fluorouridine
  modified_base 10: mod_base = OTHER; note = 2'-fluorouridine
  modified_base 11: mod_base = OTHER; note = 2'-fluoroguanosine
  modified_base 12: mod_base = um
  modified_base 13: mod_base = cm
  modified_base 14: mod_base = OTHER; note = 2'-O-methyladenosine
  modified_base 15: mod_base = OTHER; note = 2'-O-methyladenosine
  modified_base 16: mod_base = gm
  modified_base 17: mod_base = OTHER; note = 2'-O-methyladenosine
  modified_base 18: mod_base = cm
  modified_base 19: mod_base = OTHER; note = 2'-O-methyluridine with a 3'-phosphorothioate linkage
  modified_base 20: mod_base = OTHER; note = 2'-O-methyluridine with a 3'-phosphorothioate linkage
  modified_base 21: mod_base = OTHER; note = 2'-O-methyladenosine
ctacaatgttgtcaagactta

SEQ ID NO: 1163 - RNA, 23 nt, synthetic construct
  source 1..23: mol_type = other RNA
  modified_base 1: mod_base = OTHER; note = 2'-O-methyluridine with a 3'-phosphorothioate linkage and a 5'-phosphate substitution
  modified_base 2: mod_base = OTHER; note = 2'-fluoroadenosine with a 3'-phosphorothioate linkage
  modified_base 3: mod_base = OTHER; note = 2'-O-methyladenosine
  modified_base 4: mod_base = gm
  modified_base 5: mod_base = OTHER; note = 2'-fluorouridine
  modified_base 6: mod_base = cm
  modified_base 7: mod_base = OTHER; note = 2'-fluorouridine
  modified_base 8: mod_base = um
  modified_base 9: mod_base = gm
  modified_base 10: mod_base = OTHER; note = 2'-O-methyladenosine
  modified_base 11: mod_base = cm
  modified_base 12: mod_base = OTHER; note = 2'-O-methyladenosine
  modified_base 13: mod_base = OTHER; note = 2'-O-methyladenosine
  modified_base 14: mod_base = OTHER; note = 2'-fluorocytidine
  modified_base 15: mod_base = OTHER; note = 2'-O-methyladenosine
  modified_base 16: mod_base = OTHER; note = 2'-fluorouridine
  modified_base 17: mod_base = um
  modified_base 18: mod_base = gm
  modified_base 19: mod_base = um
  modified_base 20: mod_base = OTHER; note = 2'-O-methyladenosine
  modified_base 21: mod_base = OTHER; note = 2'-O-methylguanosine with a 3'-phosphorothioate linkage
  modified_base 22: mod_base = OTHER; note = 2'-O-methylcytidine with a 3'-phosphorothioate linkage
  modified_base 23: mod_base = um
taagtcttgacaacattgtagct

SEQ ID NO: 1164 - RNA, 21 nt, synthetic construct
  source 1..21: mol_type = other RNA
  modified_base 1: mod_base = OTHER; note = 2'-O-methyladenosine with a 3'-phosphorothioate linkage
  modified_base 2: mod_base = OTHER; note = 2'-O-methyluridine with a 3'-phosphorothioate linkage
  modified_base 3: mod_base = gm
  modified_base 4: mod_base = OTHER; note = 2'-O-methyladenosine
  modified_base 5: mod_base = um
  modified_base 6: mod_base = gm
  modified_base 7: mod_base = um
  modified_base 8: mod_base = cm
  modified_base 9: mod_base = OTHER; note = 2'-fluorocytidine
  modified_base 10: mod_base = OTHER; note = 2'-fluoroadenosine
  modified_base 11: mod_base = OTHER; note = 2'-fluorouridine
  modified_base 12: mod_base = gm
  modified_base 13: mod_base = OTHER; note = 2'-O-methyladenosine
  modified_base 14: mod_base = OTHER; note = 2'-O-methyladenosine
  modified_base 15: mod_base = cm
  modified_base 16: mod_base = OTHER; note = 2'-O-methyladenosine
  modified_base 17: mod_base = um
  modified_base 18: mod_base = gm
  modified_base 19: mod_base = OTHER; note = 2'-O-methyluridine with a 3'-phosphorothioate linkage
  modified_base 20: mod_base = OTHER; note = 2'-O-methyluridine with a 3'-phosphorothioate linkage
  modified_base 21: mod_base = OTHER; note = 2'-O-methyladenosine
atgatgtccatgaacatgtta

SEQ ID NO: 1165 - RNA, 23 nt, synthetic construct
  source 1..23: mol_type = other RNA
  modified_base 1: mod_base = OTHER; note = 2'-O-methyluridine with a 3'-phosphorothioate linkage and a 5'-phosphate substitution
  modified_base 2: mod_base = OTHER; note = 2'-fluoroadenosine with a 3'-phosphorothioate linkage
  modified_base 3: mod_base = OTHER; note = 2'-O-methyladenosine
  modified_base 4: mod_base = cm
  modified_base 5: mod_base = OTHER; note = 2'-fluoroadenosine
  modified_base 6: mod_base = um
  modified_base 7: mod_base = OTHER; note = 2'-fluoroguanosine
  modified_base 8: mod_base = um
  modified_base 9: mod_base = um
  modified_base 10: mod_base = cm
  modified_base 11: mod_base = OTHER; note = 2'-O-methyladenosine
  modified_base 12: mod_base = um
  modified_base 13: mod_base = gm
  modified_base 14: mod_base = OTHER; note = 2'-fluoroguanosine
  modified_base 15: mod_base = OTHER; note = 2'-O-methyladenosine
  modified_base 16: mod_base = OTHER; note = 2'-fluorocytidine
  modified_base 17: mod_base = OTHER; note = 2'-O-methyladenosine
  modified_base 18: mod_base = um
  modified_base 19: mod_base = cm
  modified_base 20: mod_base = OTHER; note = 2'-O-methyladenosine
  modified_base 21: mod_base = OTHER; note = 2'-O-methyluridine with a 3'-phosphorothioate linkage
  modified_base 22: mod_base = OTHER; note = 2'-O-methylguanosine with a 3'-phosphorothioate linkage
  modified_base 23: mod_base = cm
taacatgttcatggacatcatgc

SEQ ID NO: 1166 - RNA, 21 nt, synthetic construct
  source 1..21: mol_type = other RNA
  modified_base 1: mod_base = OTHER; note = 2'-O-methyladenosine with a 3'-phosphorothioate linkage
  modified_base 2: mod_base = OTHER; note = 2'-O-methyluridine with a 3'-phosphorothioate linkage
  modified_base 3: mod_base = OTHER; note = 2'-O-methyladenosine
  modified_base 4: mod_base = um
  modified_base 5: mod_base = um
  modified_base 6: mod_base = um
  modified_base 7: mod_base = OTHER; note = 2'-O-methyladenosine
  modified_base 8: mod_base = cm
  modified_base 9: mod_base = OTHER; note = 2'-fluorouridine
  modified_base 10: mod_base = OTHER; note = 2'-fluorouridine
  modified_base 11: mod_base = OTHER; note = 2'-fluorocytidine
  modified_base 12: mod_base = cm
  modified_base 13: mod_base = OTHER; note = 2'-O-methyladenosine
  modified_base 14: mod_base = gm
  modified_base 15: mod_base = um
  modified_base 16: mod_base = um
  modified_base 17: mod_base = cm
  modified_base 18: mod_base = cm
  modified_base 19: mod_base = OTHER; note = 2'-O-methyladenosine with a 3'-phosphorothioate linkage
  modified_base 20: mod_base = OTHER; note = 2'-O-methylguanosine with a 3'-phosphorothioate linkage
  modified_base 21: mod_base = OTHER; note = 2'-O-methyladenosine
atatttacttccagttccaga

SEQ ID NO: 1167 - RNA, 23 nt, synthetic construct
  source 1..23: mol_type = other RNA
  modified_base 1: mod_base = OTHER; note = 2'-O-methyluridine with a 3'-phosphorothioate linkage and a 5'-phosphate substitution
  modified_base 2: mod_base = OTHER; note = 2'-fluorocytidine with a 3'-phosphorothioate linkage
  modified_base 3: mod_base = um
  modified_base 4: mod_base = gm
  modified_base 5: mod_base = OTHER; note = 2'-fluoroguanosine
  modified_base 6: mod_base = OTHER; note = 2'-O-methyladenosine
  modified_base 7: mod_base = OTHER; note = 2'-fluoroadenosine
  modified_base 8: mod_base = cm
  modified_base 9: mod_base = um
  modified_base 10: mod_base = gm
  modified_base 11: mod_base = gm
  modified_base 12: mod_base = OTHER; note = 2'-O-methyladenosine
  modified_base 13: mod_base = OTHER; note = 2'-O-methyladenosine
  modified_base 14: mod_base = OTHER; note = 2'-fluoroguanosine
  modified_base 15: mod_base = um
  modified_base 16: mod_base = OTHER; note = 2'-fluoroadenosine
  modified_base 17: mod_base = OTHER; note = 2'-O-methyladenosine
  modified_base 18: mod_base = OTHER; note = 2'-O-methyladenosine
  modified_base 19: mod_base = um
  modified_base 20: mod_base = OTHER; note = 2'-O-methyladenosine
  modified_base 21: mod_base = OTHER; note = 2'-O-methyluridine with a 3'-phosphorothioate linkage
  modified_base 22: mod_base = OTHER; note = 2'-O-methyladenosine with a 3'-phosphorothioate linkage
  modified_base 23: mod_base = cm
tctggaactggaagtaaatatac

SEQ ID NO: 1168 - RNA, 21 nt, synthetic construct
  source 1..21: mol_type = other RNA
  modified_base 1: mod_base = OTHER; note = 2'-O-methyladenosine with a 3'-phosphorothioate linkage
  modified_base 2: mod_base = OTHER; note = 2'-O-methyluridine with a 3'-phosphorothioate linkage
  modified_base 3: mod_base = um
  modified_base 4: mod_base = um
  modified_base 5: mod_base = OTHER; note = 2'-O-methyladenosine
  modified_base 6: mod_base = cm
  modified_base 7: mod_base = um
  modified_base 8: mod_base = um
  modified_base 9: mod_base = OTHER; note = 2'-fluorocytidine
  modified_base 10: mod_base = OTHER; note = 2'-fluorocytidine
  modified_base 11: mod_base = OTHER; note = 2'-fluoroadenosine
  modified_base 12: mod_base = gm
  modified_base 13: mod_base = um
  modified_base 14: mod_base = um
  modified_base 15: mod_base = cm
  modified_base 16: mod_base = cm
  modified_base 17: mod_base = OTHER; note = 2'-O-methyladenosine
  modified_base 18: mod_base = gm
  modified_base 19: mod_base = OTHER; note = 2'-O-methyladenosine with a 3'-phosphorothioate linkage
  modified_base 20: mod_base = OTHER; note = 2'-O-methyladenosine with a 3'-phosphorothioate linkage
  modified_base 21: mod_base = OTHER; note = 2'-O-methyladenosine
atttacttccagttccagaaa

SEQ ID NO: 1169 - RNA, 23 nt, synthetic construct
  source 1..23: mol_type = other RNA
  modified_base 1: mod_base = OTHER; note = 2'-O-methyluridine with a 3'-phosphorothioate linkage and a 5'-phosphate substitution
  modified_base 2: mod_base = OTHER; note = 2'-fluorouridine with a 3'-phosphorothioate linkage
  modified_base 3: mod_base = um
  modified_base 4: mod_base = cm
  modified_base 5: mod_base = OTHER; note = 2'-fluorouridine
  modified_base 6: mod_base = gm
  modified_base 7: mod_base = OTHER; note = 2'-fluoroguanosine
  modified_base 8: mod_base = OTHER; note = 2'-O-methyladenosine
  modified_base 9: mod_base = OTHER; note = 2'-O-methyladenosine
  modified_base 10: mod_base = cm
  modified_base 11: mod_base = um
  modified_base 12: mod_base = gm
  modified_base 13: mod_base = gm
  modified_base 14: mod_base = OTHER; note = 2'-fluoroadenosine
  modified_base 15: mod_base = OTHER; note = 2'-O-methyladenosine
  modified_base 16: mod_base = OTHER; note = 2'-fluoroguanosine
  modified_base 17: mod_base = um
  modified_base 18: mod_base = OTHER; note = 2'-O-methyladenosine
  modified_base 19: mod_base = OTHER; note = 2'-O-methyladenosine
  modified_base 20: mod_base = OTHER; note = 2'-O-methyladenosine
  modified_base 21: mod_base = OTHER; note = 2'-O-methyluridine with a 3'-phosphorothioate linkage
  modified_base 22: mod_base = OTHER; note = 2'-O-methyladenosine with a 3'-phosphorothioate linkage
  modified_base 23: mod_base = um
tttctggaactggaagtaaatat

SEQ ID NO: 1170 - RNA, 21 nt, synthetic construct
  source 1..21: mol_type = other RNA
  modified_base 1: mod_base = OTHER; note = 2'-O-methyladenosine with a 3'-phosphorothioate linkage
  modified_base 2: mod_base = OTHER; note = 2'-O-methyladenosine with a 3'-phosphorothioate linkage
  modified_base 3: mod_base = um
  modified_base 4: mod_base = gm
  modified_base 5: mod_base = OTHER; note = 2'-O-methyladenosine
  modified_base 6: mod_base = OTHER; note = 2'-O-methyladenosine
  modified_base 7: mod_base = gm
  modified_base 8: mod_base = cm
  modified_base 9: mod_base = OTHER; note = 2'-fluorouridine
  modified_base 10: mod_base = OTHER; note = 2'-fluorouridine
  modified_base 11: mod_base = OTHER; note = 2'-fluorouridine
  modified_base 12: mod_base = gm
  modified_base 13: mod_base = cm
  modified_base 14: mod_base = cm
  modified_base 15: mod_base = cm
  modified_base 16: mod_base = um
  modified_base 17: mod_base = um
  modified_base 18: mod_base = um
  modified_base 19: mod_base = OTHER; note = 2'-O-methyluridine with a 3'-phosphorothioate linkage
  modified_base 20: mod_base = OTHER; note = 2'-O-methyluridine with a 3'-phosphorothioate linkage
  modified_base 21: mod_base = OTHER; note = 2'-O-methyladenosine
aatgaagctttgcccttttta

SEQ ID NO: 1171 - RNA, 23 nt, synthetic construct
  source 1..23: mol_type = other RNA
  modified_base 1: mod_base = OTHER; note = 2'-O-methyluridine with a 3'-phosphorothioate linkage and a 5'-phosphate substitution
  modified_base 2: mod_base = OTHER; note = 2'-fluoroadenosine with a 3'-phosphorothioate linkage
  modified_base 3: mod_base = OTHER; note = 2'-O-methyladenosine
  modified_base 4: mod_base = OTHER; note = 2'-O-methyladenosine
  modified_base 5: mod_base = OTHER; note = 2'-fluoroadenosine
  modified_base 6: mod_base = OTHER; note = 2'-O-methyladenosine
  modified_base 7: mod_base = OTHER; note = 2'-fluoroguanosine
  modified_base 8: mod_base = gm
  modified_base 9: mod_base = gm
  modified_base 10: mod_base = cm
  modified_base 11: mod_base = OTHER; note = 2'-O-methyladenosine
  modified_base 12: mod_base = OTHER; note = 2'-O-methyladenosine
  modified_base 13: mod_base = OTHER; note = 2'-O-methyladenosine
  modified_base 14: mod_base = OTHER; note = 2'-fluoroguanosine
  modified_base 15: mod_base = cm
  modified_base 16: mod_base = OTHER; note = 2'-fluorouridine
  modified_base 17: mod_base = um
  modified_base 18: mod_base = cm
  modified_base 19: mod_base = OTHER; note = 2'-O-methyladenosine
  modified_base 20: mod_base = um
  modified_base 21: mod_base = OTHER; note = 2'-O-methyluridine with a 3'-phosphorothioate linkage
  modified_base 22: mod_base = OTHER; note = 2'-O-methylcytidine with a 3'-phosphorothioate linkage
  modified_base 23: mod_base = OTHER; note = 2'-O-methyladenosine
taaaaagggcaaagcttcattca

SEQ ID NO: 1172 - RNA, 21 nt, synthetic construct
  source 1..21: mol_type = other RNA
  modified_base 1: mod_base = OTHER; note = 2'-O-methylcytidine with a 3'-phosphorothioate linkage
  modified_base 2: mod_base = OTHER; note = 2'-O-methyladenosine with a 3'-phosphorothioate linkage
  modified_base 3: mod_base = cm
  modified_base 4: mod_base = OTHER; note = 2'-O-methyladenosine
  modified_base 5: mod_base = um
  modified_base 6: mod_base = um
  modified_base 7: mod_base = OTHER; note = 2'-O-methyladenosine
  modified_base 8: mod_base = gm
  modified_base 9: mod_base = OTHER; note = 2'-fluorocytidine
  modified_base 10: mod_base = OTHER; note = 2'-fluoroadenosine
  modified_base 11: mod_base = OTHER; note = 2'-fluoroadenosine
  modified_base 12: mod_base = OTHER; note = 2'-O-methyladenosine
  modified_base 13: mod_base = gm
  modified_base 14: mod_base = um
  modified_base 15: mod_base = um
  modified_base 16: mod_base = um
  modified_base 17: mod_base = gm
  modified_base 18: mod_base = cm
  modified_base 19: mod_base = OTHER; note = 2'-O-methylcytidine with a 3'-phosphorothioate linkage
  modified_base 20: mod_base = OTHER; note = 2'-O-methylcytidine with a 3'-phosphorothioate linkage
  modified_base 21: mod_base = OTHER; note = 2'-O-methyladenosine
cacattagcaaagtttgccca

SEQ ID NO: 1173 - RNA, 23 nt, synthetic construct
  source 1..23: mol_type = other RNA
  modified_base 1: mod_base = OTHER; note = 2'-O-methyluridine with a 3'-phosphorothioate linkage and a 5'-phosphate substitution
  modified_base 2: mod_base = OTHER; note = 2'-fluoroguanosine with a 3'-phosphorothioate linkage
  modified_base 3: mod_base = gm
  modified_base 4: mod_base = gm
  modified_base 5: mod_base = OTHER; note = 2'-fluorocytidine
  modified_base 6: mod_base = OTHER; note = 2'-O-methyladenosine
  modified_base 7: mod_base = OTHER; note = 2'-fluoroadenosine
  modified_base 8: mod_base = OTHER; note = 2'-O-methyladenosine
  modified_base 9: mod_base = cm
  modified_base 10: mod_base = um
  modified_base 11: mod_base = um
  modified_base 12: mod_base = um
  modified_base 13: mod_base = gm
  modified_base 14: mod_base = OTHER; note = 2'-fluorocytidine
  modified_base 15: mod_base = um
  modified_base 16: mod_base = OTHER; note = 2'-fluoroadenosine
  modified_base 17: mod_base = OTHER; note = 2'-O-methyladenosine
  modified_base 18: mod_base = um
  modified_base 19: mod_base = gm
  modified_base 20: mod_base = um
  modified_base 21: mod_base = OTHER; note = 2'-O-methylguanosine with a 3'-phosphorothioate linkage
  modified_base 22: mod_base = OTHER; note = 2'-O-methylcytidine with a 3'-phosphorothioate linkage
  modified_base 23: mod_base = um
tgggcaaactttgctaatgtgct

SEQ ID NO: 1174 - RNA, 21 nt, synthetic construct
  source 1..21: mol_type = other RNA
  modified_base 1: mod_base = OTHER; note = 2'-O-methyladenosine with a 3'-phosphorothioate linkage
  modified_base 2: mod_base = OTHER; note = 2'-O-methylcytidine with a 3'-phosphorothioate linkage
  modified_base 3: mod_base = OTHER; note = 2'-O-methyladenosine
  modified_base 4: mod_base = um
  modified_base 5: mod_base = um
  modified_base 6: mod_base = OTHER; note = 2'-O-methyladenosine
  modified_base 7: mod_base = gm
  modified_base 8: mod_base = cm
  modified_base 9: mod_base = OTHER; note = 2'-fluoroadenosine
  modified_base 10: mod_base = OTHER; note = 2'-fluoroadenosine
  modified_base 11: mod_base = OTHER; note = 2'-fluoroadenosine
  modified_base 12: mod_base = gm
  modified_base 13: mod_base = um
  modified_base 14: mod_base = um
  modified_base 15: mod_base = um
  modified_base 16: mod_base = gm
  modified_base 17: mod_base = cm
  modified_base 18: mod_base = cm
  modified_base 19: mod_base = OTHER; note = 2'-O-methylcytidine with a 3'-phosphorothioate linkage
  modified_base 20: mod_base = OTHER; note = 2'-O-methyluridine with a 3'-phosphorothioate linkage
  modified_base 21: mod_base = OTHER; note = 2'-O-methyladenosine
acattagcaaagtttgcccta

SEQ ID NO: 1175 - RNA, 23 nt, synthetic construct
  source 1..23: mol_type = other RNA
  modified_base 1: mod_base = OTHER; note = 2'-O-methyluridine with a 3'-phosphorothioate linkage and a 5'-phosphate substitution
  modified_base 2: mod_base = OTHER; note = 2'-fluoroadenosine with a 3'-phosphorothioate linkage
  modified_base 3: mod_base = gm
  modified_base 4: mod_base = gm
  modified_base 5: mod_base = OTHER; note = 2'-fluoroguanosine
  modified_base 6: mod_base = cm
  modified_base 7: mod_base = OTHER; note = 2'-fluoroadenosine
  modified_base 8: mod_base = OTHER; note = 2'-O-methyladenosine
  modified_base 9: mod_base = OTHER; note = 2'-O-methyladenosine
  modified_base 10: mod_base = cm
  modified_base 11: mod_base = um
  modified_base 12: mod_base = um
  modified_base 13: mod_base = um
  modified_base 14: mod_base = OTHER; note = 2'-fluoroguanosine
  modified_base 15: mod_base = cm
  modified_base 16: mod_base = OTHER; note = 2'-fluorouridine
  modified_base 17: mod_base = OTHER; note = 2'-O-methyladenosine
  modified_base 18: mod_base = OTHER; note = 2'-O-methyladenosine
  modified_base 19: mod_base = um
  modified_base 20: mod_base = gm
  modified_base 21: mod_base = OTHER; note = 2'-O-methyluridine with a 3'-phosphorothioate linkage
  modified_base 22: mod_base = OTHER; note = 2'-O-methylguanosine with a 3'-phosphorothioate linkage
  modified_base 23: mod_base = cm
tagggcaaactttgctaatgtgc

SEQ ID NO: 1176 - RNA, 21 nt, synthetic construct
  source 1..21: mol_type = other RNA
  modified_base 1: mod_base = OTHER; note = 2'-O-methylcytidine with a 3'-phosphorothioate linkage
  modified_base 2: mod_base = OTHER; note = 2'-O-methyladenosine with a 3'-phosphorothioate linkage
  modified_base 3: mod_base = um
  modified_base 4: mod_base = um
  modified_base 5: mod_base = OTHER; note = 2'-O-methyladenosine
  modified_base 6: mod_base = gm
  modified_base 7: mod_base = cm
  modified_base 8: mod_base = OTHER; note = 2'-O-methyladenosine
  modified_base 9: mod_base = OTHER; note = 2'-fluoroadenosine
  modified_base 10: mod_base = OTHER; note = 2'-fluoroadenosine
  modified_base 11: mod_base = OTHER; note = 2'-fluoroguanosine
  modified_base 12: mod_base = um
  modified_base 13: mod_base = um
  modified_base 14: mod_base = um
  modified_base 15: mod_base = gm
  modified_base 16: mod_base = cm
  modified_base 17: mod_base = cm
  modified_base 18: mod_base = cm
  modified_base 19: mod_base = OTHER; note = 2'-O-methyluridine with a 3'-phosphorothioate linkage
  modified_base 20: mod_base = OTHER; note = 2'-O-methylcytidine with a 3'-phosphorothioate linkage
  modified_base 21: mod_base = OTHER; note = 2'-O-methyladenosine
cattagcaaagtttgccctca

SEQ ID NO: 1177 - RNA, 23 nt, synthetic construct
  source 1..23: mol_type = other RNA
  modified_base 1: mod_base = OTHER; note = 2'-O-methyluridine with a 3'-phosphorothioate linkage and a 5'-phosphate substitution
  modified_base 2: mod_base = OTHER; note = 2'-fluoroguanosine with a 3'-phosphorothioate linkage
  modified_base 3: mod_base = OTHER; note = 2'-O-methyladenosine
  modified_base 4: mod_base = gm
  modified_base 5: mod_base = OTHER; note = 2'-fluoroguanosine
  modified_base 6: mod_base = gm
  modified_base 7: mod_base = OTHER; note = 2'-fluorocytidine
  modified_base 8: mod_base = OTHER; note = 2'-O-methyladenosine
  modified_base 9: mod_base = OTHER; note = 2'-O-methyladenosine
  modified_base 10: mod_base = OTHER; note = 2'-O-methyladenosine
  modified_base 11: mod_base = cm
  modified_base 12: mod_base = um
  modified_base 13: mod_base = um
  modified_base 14: mod_base = OTHER; note = 2'-fluorouridine
  modified_base 15: mod_base = gm
  modified_base 16: mod_base = OTHER; note = 2'-fluorocytidine
  modified_base 17: mod_base = um
  modified_base 18: mod_base = OTHER; note = 2'-O-methyladenosine
  modified_base 19: mod_base = OTHER; note = 2'-O-methyladenosine
  modified_base 20: mod_base = um
  modified_base 21: mod_base = OTHER; note = 2'-O-methylguanosine with a 3'-phosphorothioate linkage
  modified_base 22: mod_base = OTHER; note = 2'-O-methyluridine with a 3'-phosphorothioate linkage
  modified_base 23: mod_base = gm
tgagggcaaactttgctaatgtg

SEQ ID NO: 1178 - RNA, 21 nt, synthetic construct
  source 1..21: mol_type = other RNA
  modified_base 1: mod_base = OTHER; note = 2'-O-methyluridine with a 3'-phosphorothioate linkage
  modified_base 2: mod_base = OTHER; note = 2'-O-methyladenosine with a 3'-phosphorothioate linkage
  modified_base 3: mod_base = gm
  modified_base 4: mod_base = cm
  modified_base 5: mod_base = OTHER; note = 2'-O-methyladenosine
  modified_base 6: mod_base = OTHER; note = 2'-O-methyladenosine
  modified_base 7: mod_base = OTHER; note = 2'-O-methyladenosine
  modified_base 8: mod_base = gm
  modified_base 9: mod_base = OTHER; note = 2'-fluorouridine
  modified_base 10: mod_base = OTHER; note = 2'-fluorouridine
  modified_base 11: mod_base = OTHER; note = 2'-fluorouridine
  modified_base 12: mod_base = gm
  modified_base 13: mod_base = cm
  modified_base 14: mod_base = cm
  modified_base 15: mod_base = cm
  modified_base 16: mod_base = um
  modified_base 17: mod_base = cm
  modified_base 18: mod_base = OTHER; note = 2'-O-methyladenosine
  modified_base 19: mod_base = OTHER; note = 2'-O-methylguanosine with a 3'-phosphorothioate linkage
  modified_base 20: mod_base = OTHER; note = 2'-O-methyluridine with a 3'-phosphorothioate linkage
  modified_base 21: mod_base = OTHER; note = 2'-O-methyladenosine
tagcaaagtttgccctcagta

SEQ ID NO: 1179 - RNA, 23 nt, synthetic construct
  source 1..23: mol_type = other RNA
  modified_base 1: mod_base = OTHER; note = 2'-O-methyluridine with a 3'-phosphorothioate linkage and a 5'-phosphate substitution
  modified_base 2: mod_base = OTHER; note = 2'-fluoroadenosine with a 3'-phosphorothioate linkage
  modified_base 3: mod_base = cm
  modified_base 4: mod_base = um
  modified_base 5: mod_base = OTHER; note = 2'-fluoroguanosine
  modified_base 6: mod_base = OTHER; note = 2'-O-methyladenosine
  modified_base 7: mod_base = OTHER; note = 2'-fluoroguanosine
  modified_base 8: mod_base = gm
  modified_base 9: mod_base = gm
  modified_base 10: mod_base = cm
  modified_base 11: mod_base = OTHER; note = 2'-O-methyladenosine
  modified_base 12: mod_base = OTHER; note = 2'-O-methyladenosine
  modified_base 13: mod_base = OTHER; note = 2'-O-methyladenosine
  modified_base 14: mod_base = OTHER; note = 2'-fluorocytidine
  modified_base 15: mod_base = um
  modified_base 16: mod_base = OTHER; note = 2'-fluorouridine
  modified_base 17: mod_base = um
  modified_base 18: mod_base = gm
  modified_base 19: mod_base = cm
  modified_base 20: mod_base = um
  modified_base 21: mod_base = OTHER; note = 2'-O-methyladenosine with a 3'-phosphorothioate linkage
  modified_base 22: mod_base = OTHER; note = 2'-O-methyladenosine with a 3'-phosphorothioate linkage
  modified_base 23: mod_base = um
tactgagggcaaactttgctaat

SEQ ID NO: 1180 - RNA, 21 nt, synthetic construct
  source 1..21: mol_type = other RNA
  modified_base 1: mod_base = OTHER; note = 2'-O-methylguanosine with a 3'-phosphorothioate linkage
  modified_base 2: mod_base = OTHER; note = 2'-O-methylcytidine with a 3'-phosphorothioate linkage
  modified_base 3: mod_base = OTHER; note = 2'-O-methyladenosine
  modified_base 4: mod_base = OTHER; note = 2'-O-methyladenosine
  modified_base 5: mod_base = OTHER; note = 2'-O-methyladenosine
  modified_base 6: mod_base = gm
  modified_base 7: mod_base = um
  modified_base 8: mod_base = um
  modified_base 9: mod_base = OTHER; note = 2'-fluorouridine
  modified_base 10: mod_base = OTHER; note = 2'-fluoroguanosine
  modified_base 11: mod_base = OTHER; note = 2'-fluorocytidine
  modified_base 12: mod_base = cm
  modified_base 13: mod_base = cm
  modified_base 14: mod_base = um
  modified_base 15: mod_base = cm
  modified_base 16: mod_base = OTHER; note = 2'-O-methyladenosine
  modified_base 17: mod_base = gm
  modified_base 18: mod_base = um
  modified_base 19: mod_base = OTHER; note = 2'-O-methyluridine with a 3'-phosphorothioate linkage
  modified_base 20: mod_base = OTHER; note = 2'-O-methylcytidine with a 3'-phosphorothioate linkage
  modified_base 21: mod_base = OTHER; note = 2'-O-methyladenosine
gcaaagtttgccctcagttca

SEQ ID NO: 1181 - RNA, 23 nt, synthetic construct
  source 1..23: mol_type = other RNA
  modified_base 1: mod_base = OTHER; note = 2'-O-methyluridine with a 3'-phosphorothioate linkage and a 5'-phosphate substitution
  modified_base 2: mod_base = OTHER; note = 2'-fluoroguanosine with a 3'-phosphorothioate linkage
  modified_base 3: mod_base = OTHER; note = 2'-O-methyladenosine
  modified_base 4: mod_base = OTHER; note = 2'-O-methyladenosine
  modified_base 5: mod_base = OTHER; note = 2'-fluorocytidine
  modified_base 6: mod_base = um
  modified_base 7: mod_base = OTHER; note = 2'-fluoroguanosine
  modified_base 8: mod_base = OTHER; note = 2'-O-methyladenosine
  modified_base 9: mod_base = gm
  modified_base 10: mod_base = gm
  modified_base 11: mod_base = gm
  modified_base 12: mod_base = cm
  modified_base 13: mod_base = OTHER; note = 2'-O-methyladenosine
  modified_base 14: mod_base = OTHER; note = 2'-fluoroadenosine
  modified_base 15: mod_base = OTHER; note = 2'-O-methyladenosine
  modified_base 16: mod_base = OTHER; note = 2'-fluorocytidine
  modified_base 17: mod_base = um
  modified_base 18: mod_base = um
  modified_base 19: mod_base = um
  modified_base 20: mod_base = gm
  modified_base 21: mod_base = OTHER; note = 2'-O-methylcytidine with a 3'-phosphorothioate linkage
  modified_base 22: mod_base = OTHER; note = 2'-O-methyluridine with a 3'-phosphorothioate linkage
  modified_base 23: mod_base = OTHER; note = 2'-O-methyladenosine
tgaactgagggcaaactttgcta

SEQ ID NO: 1182 - RNA, 21 nt, synthetic construct
  source 1..21: mol_type = other RNA
  modified_base 1: mod_base = OTHER; note = 2'-O-methyladenosine with a 3'-phosphorothioate linkage
  modified_base 2: mod_base = OTHER; note = 2'-O-methylcytidine with a 3'-phosphorothioate linkage
  modified_base 3: mod_base = um
  modified_base 4: mod_base = cm
  modified_base 5: mod_base = OTHER; note = 2'-O-methyladenosine
  modified_base 6: mod_base = cm
  modified_base 7: mod_base = OTHER; note = 2'-O-methyladenosine
  modified_base 8: mod_base = gm
  modified_base 9: mod_base = OTHER; note = 2'-fluoroguanosine
  modified_base 10: mod_base = OTHER; note = 2'-fluoroadenosine
  modified_base 11: mod_base = OTHER; note = 2'-fluorouridine
  modified_base 12: mod_base = gm
  modified_base 13: mod_base = OTHER; note = 2'-O-methyladenosine
  modified_base 14: mod_base = OTHER; note = 2'-O-methyladenosine
  modified_base 15: mod_base = gm
  modified_base 16: mod_base = um
  modified_base 17: mod_base = OTHER; note = 2'-O-methyladenosine
  modified_base 18: mod_base = OTHER; note = 2'-O-methyladenosine
  modified_base 19: mod_base = OTHER; note = 2'-O-methylguanosine with a 3'-phosphorothioate linkage
  modified_base 20: mod_base = OTHER; note = 2'-O-methylguanosine with a 3'-phosphorothioate linkage
  modified_base 21: mod_base = OTHER; note = 2'-O-methyladenosine
actcacaggatgaagtaagga

SEQ ID NO: 1183 - RNA, 23 nt, synthetic construct
  source 1..23: mol_type = other RNA
  modified_base 1: mod_base = OTHER; note = 2'-O-methyluridine with a 3'-phosphorothioate linkage and a 5'-phosphate substitution
  modified_base 2: mod_base = OTHER; note = 2'-fluorocytidine with a 3'-phosphorothioate linkage
  modified_base 3: mod_base = cm
  modified_base 4: mod_base = um
  modified_base 5: mod_base = OTHER; note = 2'-fluorouridine
  modified_base 6: mod_base = OTHER; note = 2'-O-methyladenosine
  modified_base 7: mod_base = OTHER; note = 2'-fluorocytidine
  modified_base 8: mod_base = um
  modified_base 9: mod_base = um
  modified_base 10: mod_base = cm
  modified_base 11: mod_base = OTHER; note = 2'-O-methyladenosine
  modified_base 12: mod_base = um
  modified_base 13: mod_base = cm
  modified_base 14: mod_base = OTHER; note = 2'-fluorocytidine
  modified_base 15: mod_base = um
  modified_base 16: mod_base = OTHER; note = 2'-fluoroguanosine
  modified_base 17: mod_base = um
  modified_base 18: mod_base = gm
  modified_base 19: mod_base = OTHER; note = 2'-O-methyladenosine
  modified_base 20: mod_base = gm
  modified_base 21: mod_base = OTHER; note = 2'-O-methyluridine with a 3'-phosphorothioate linkage
  modified_base 22: mod_base = OTHER; note = 2'-O-methyluridine with a 3'-phosphorothioate linkage
  modified_base 23: mod_base = gm
tccttacttcatcctgtgagttg

SEQ ID NO: 1184 - RNA, 21 nt, synthetic construct
  source 1..21: mol_type = other RNA
  modified_base 1: mod_base = OTHER; note = 2'-O-methylcytidine with a 3'-phosphorothioate linkage
  modified_base 2: mod_base = OTHER; note = 2'-O-methyladenosine with a 3'-phosphorothioate linkage
  modified_base 3: mod_base = cm
  modified_base 4: mod_base = OTHER; note = 2'-O-methyladenosine
  modified_base 5: mod_base = gm
  modified_base 6: mod_base = gm
  modified_base 7: mod_base = OTHER; note = 2'-O-methyladenosine
  modified_base 8: mod_base = um
  modified_base 9: mod_base = OTHER; note = 2'-fluoroguanosine
  modified_base 10: mod_base = OTHER; note = 2'-fluoroadenosine
  modified_base 11: mod_base = OTHER; note = 2'-fluoroadenosine
  modified_base 12: mod_base = gm
  modified_base 13: mod_base = um
  modified_base 14: mod_base = OTHER; note = 2'-O-methyladenosine
  modified_base 15: mod_base = OTHER; note = 2'-O-methyladenosine
  modified_base 16: mod_base = gm
  modified_base 17: mod_base = gm
  modified_base 18: mod_base = gm
  modified_base 19: mod_base = OTHER; note = 2'-O-methyladenosine with a 3'-phosphorothioate linkage
  modified_base 20: mod_base = OTHER; note = 2'-O-methyladenosine with a 3'-phosphorothioate linkage
  modified_base 21: mod_base = OTHER; note = 2'-O-methyladenosine
cacaggatgaagtaagggaaa

SEQ ID NO: 1185 - RNA, 23 nt, synthetic construct
  source 1..23: mol_type = other RNA
  modified_base 1: mod_base = OTHER; note = 2'-O-methyluridine with a 3'-phosphorothioate linkage and a 5'-phosphate substitution
  modified_base 2: mod_base = OTHER; note = 2'-fluorouridine with a 3'-phosphorothioate linkage
  modified_base 3: mod_base = um
  modified_base 4: mod_base = cm
  modified_base 5: mod_base = OTHER; note = 2'-fluorocytidine
  modified_base 6: mod_base = cm
  modified_base 7: mod_base = OTHER; note = 2'-fluorouridine
  modified_base 8: mod_base = um
  modified_base 9: mod_base = OTHER; note = 2'-O-methyladenosine
  modified_base 10: mod_base = cm
  modified_base 11: mod_base = um
  modified_base 12: mod_base = um
  modified_base 13: mod_base = cm
  modified_base 14: mod_base = OTHER; note = 2'-fluoroadenosine
  modified_base 15: mod_base = um
  modified_base 16: mod_base = OTHER; note = 2'-fluorocytidine
  modified_base 17: mod_base = cm
  modified_base 18: mod_base = um
  modified_base 19: mod_base = gm
  modified_base 20: mod_base = um
  modified_base 21: mod_base = OTHER; note = 2'-O-methylguanosine with a 3'-phosphorothioate linkage
  modified_base 22: mod_base = OTHER; note = 2'-O-methyladenosine with a 3'-phosphorothioate linkage
  modified_base 23: mod_base = gm
tttcccttacttcatcctgtgag

SEQ ID NO: 1186 - RNA, 21 nt, synthetic construct
  source 1..21: mol_type = other RNA
  modified_base 1: mod_base = OTHER; note = 2'-O-methylcytidine with a 3'-phosphorothioate linkage
  modified_base 2: mod_base = OTHER; note = 2'-O-methyladenosine with a 3'-phosphorothioate linkage
  modified_base 3: mod_base = gm
  modified_base 4: mod_base = gm
  modified_base 5: mod_base = OTHER; note = 2'-O-methyladenosine
  modified_base 6: mod_base = um
  modified_base 7: mod_base = gm
  modified_base 8: mod_base = OTHER; note = 2'-O-methyladenosine
  modified_base 9: mod_base = OTHER; note = 2'-fluoroadenosine
  modified_base 10: mod_base = OTHER; note = 2'-fluoroguanosine
  modified_base 11: mod_base = OTHER; note = 2'-fluorouridine
  modified_base 12: mod_base = OTHER; note = 2'-O-methyladenosine
  modified_base 13: mod_base = OTHER; note = 2'-O-methyladenosine
  modified_base 14: mod_base = gm
  modified_base 15: mod_base = gm
  modified_base 16: mod_base = gm
  modified_base 17: mod_base = OTHER; note = 2'-O-methyladenosine
  modified_base 18: mod_base = OTHER; note = 2'-O-methyladenosine
  modified_base 19: mod_base = OTHER; note = 2'-O-methyladenosine with a 3'-phosphorothioate linkage
  modified_base 20: mod_base = OTHER; note = 2'-O-methyladenosine with a 3'-phosphorothioate linkage
  modified_base 21: mod_base = OTHER; note = 2'-O-methyladenosine
caggatgaagtaagggaaaaa

SEQ ID NO: 1187 - RNA, 23 nt, synthetic construct
  source 1..23: mol_type = other RNA
  modified_base 1: mod_base = OTHER; note = 2'-O-methyluridine with a 3'-phosphorothioate linkage and a 5'-phosphate substitution
  modified_base 2: mod_base = OTHER; note = 2'-fluorouridine with a 3'-phosphorothioate linkage
  modified_base 3: mod_base = um
  modified_base 4: mod_base = um
  modified_base 5: mod_base = OTHER; note = 2'-fluorouridine
  modified_base 6: mod_base = cm
  modified_base 7: mod_base = OTHER; note = 2'-fluorocytidine
  modified_base 8: mod_base = cm
  modified_base 9: mod_base = um
  modified_base 10: mod_base = um
  modified_base 11: mod_base = OTHER; note = 2'-O-methyladenosine
  modified_base 12: mod_base = cm
  modified_base 13: mod_base = um
  modified_base 14: mod_base = OTHER; note = 2'-fluorouridine
  modified_base 15: mod_base = cm
  modified_base 16: mod_base = OTHER; note = 2'-fluoroadenosine
  modified_base 17: mod_base = um
  modified_base 18: mod_base = cm
  modified_base 19: mod_base = cm
  modified_base 20: mod_base = um
  modified_base 21: mod_base = OTHER; note = 2'-O-methylguanosine with a 3'-phosphorothioate linkage
  modified_base 22: mod_base = OTHER; note = 2'-O-methyluridine with a 3'-phosphorothioate linkage
  modified_base 23: mod_base = gm
tttttcccttacttcatcctgtg

SEQ ID NO: 1188 - RNA, 21 nt, synthetic construct
  source 1..21: mol_type = other RNA
  modified_base 1: mod_base = OTHER; note = 2'-O-methyladenosine with a 3'-phosphorothioate linkage
  modified_base 2: mod_base = OTHER; note = 2'-O-methylguanosine with a 3'-phosphorothioate linkage
  modified_base 3: mod_base = gm
  modified_base 4: mod_base = OTHER; note = 2'-O-methyladenosine
  modified_base 5: mod_base = um
  modified_base 6: mod_base = gm
  modified_base 7: mod_base = OTHER; note = 2'-O-methyladenosine
  modified_base 8: mod_base = OTHER; note = 2'-O-methyladenosine
  modified_base 9: mod_base = OTHER; note = 2'-fluoroguanosine
  modified_base 10: mod_base = OTHER; note = 2'-fluorouridine
  modified_base 11: mod_base = OTHER; note = 2'-fluoroadenosine
  modified_base 12: mod_base = OTHER; note = 2'-O-methyladenosine
  modified_base 13: mod_base = gm
  modified_base 14: mod_base = gm
  modified_base 15: mod_base = gm
  modified_base 16: mod_base = OTHER; note = 2'-O-methyladenosine
  modified_base 17: mod_base = OTHER; note = 2'-O-methyladenosine
  modified_base 18: mod_base = OTHER; note = 2'-O-methyladenosine
  modified_base 19: mod_base = OTHER; note = 2'-O-methyladenosine with a 3'-phosphorothioate linkage
  modified_base 20: mod_base = OTHER; note = 2'-O-methyluridine with a 3'-phosphorothioate linkage
  modified_base 21: mod_base = OTHER; note = 2'-O-methyladenosine
aggatgaagtaagggaaaata

SEQ ID NO: 1189 - RNA, 23 nt, synthetic construct
  source 1..23: mol_type = other RNA
  modified_base 1: mod_base = OTHER; note = 2'-O-methyluridine with a 3'-phosphorothioate linkage and a 5'-phosphate substitution
  modified_base 2: mod_base = OTHER; note = 2'-fluoroadenosine with a 3'-phosphorothioate linkage
  modified_base 3: mod_base = um
  modified_base 4: mod_base = um
  modified_base 5: mod_base = OTHER; note = 2'-fluorouridine
  modified_base 6: mod_base = um
  modified_base 7: mod_base = OTHER; note = 2'-fluorocytidine
  modified_base 8: mod_base = cm
  modified_base 9: mod_base = cm
  modified_base 10: mod_base = um
  modified_base 11: mod_base = um
  modified_base 12: mod_base = OTHER; note = 2'-O-methyladenosine
  modified_base 13: mod_base = cm
  modified_base 14: mod_base = OTHER; note = 2'-fluorouridine
  modified_base 15: mod_base = um
  modified_base 16: mod_base = OTHER; note = 2'-fluorocytidine
  modified_base 17: mod_base = OTHER; note = 2'-O-methyladenosine
  modified_base 18: mod_base = um
  modified_base 19: mod_base = cm
  modified_base 20: mod_base = cm
  modified_base 21: mod_base = OTHER; note = 2'-O-methyluridine with a 3'-phosphorothioate linkage
  modified_base 22: mod_base = OTHER; note = 2'-O-methylguanosine with a 3'-phosphorothioate linkage
  modified_base 23: mod_base = um
tattttcccttacttcatcctgt

SEQ ID NO: 1190 - RNA, 21 nt, synthetic construct
  source 1..21: mol_type = other RNA
  modified_base 1: mod_base = OTHER; note = 2'-O-methylguanosine with a 3'-phosphorothioate linkage
  modified_base 2: mod_base = OTHER; note = 2'-O-methylcytidine with a 3'-phosphorothioate linkage
  modified_base 3: mod_base = gm
  modified_base 4: mod_base = OTHER; note = 2'-O-methyladenosine
  modified_base 5: mod_base = gm
  modified_base 6: mod_base = gm
  modified_base 7: mod_base = gm
  modified_base 8: mod_base = um
  modified_base 9: mod_base = OTHER; note = 2'-fluorocytidine
  modified_base 10: mod_base = OTHER; note = 2'-fluoroguanosine
  modified_base 11: mod_base = OTHER; note = 2'-fluorouridine
  modified_base 12: mod_base = cm
  modified_base 13: mod_base = cm
  modified_base 14: mod_base = OTHER; note = 2'-O-methyladenosine
  modified_base 15: mod_base = OTHER; note = 2'-O-methyladenosine
  modified_base 16: mod_base = um
  modified_base 17: mod_base = um
  modified_base 18: mod_base = um
  modified_base 19: mod_base = OTHER; note = 2'-O-methylguanosine with a 3'-phosphorothioate linkage
  modified_base 20: mod_base = OTHER; note = 2'-O-methylguanosine with a 3'-phosphorothioate linkage
  modified_base 21: mod_base = OTHER; note = 2'-O-methyladenosine
gcgagggtcgtccaatttgga

SEQ ID NO: 1191 - RNA, 23 nt, synthetic construct
  source 1..23: mol_type = other RNA
  modified_base 1: mod_base = OTHER; note = 2'-O-methyluridine with a 3'-phosphorothioate linkage and a 5'-phosphate substitution
  modified_base 2: mod_base = OTHER; note = 2'-fluorocytidine with a 3'-phosphorothioate linkage
  modified_base 3: mod_base = cm
  modified_base 4: mod_base = OTHER; note = 2'-O-methyladenosine
  modified_base 5: mod_base = OTHER; note = 2'-fluoroadenosine
  modified_base 6: mod_base = OTHER; note = 2'-O-methyladenosine
  modified_base 7: mod_base = OTHER; note = 2'-fluorouridine
  modified_base 8: mod_base = um
  modified_base 9: mod_base = gm
  modified_base 10: mod_base = gm
  modified_base 11: mod_base = OTHER; note = 2'-O-methyladenosine
  modified_base 12: mod_base = cm
  modified_base 13: mod_base = gm
  modified_base 14: mod_base = OTHER; note = 2'-fluoroadenosine
  modified_base 15: mod_base = cm
  modified_base 16: mod_base = OTHER; note = 2'-fluorocytidine
  modified_base 17: mod_base = cm
  modified_base 18: mod_base = um
  modified_base 19: mod_base = cm
  modified_base 20: mod_base = gm
  modified_base 21: mod_base = OTHER; note = 2'-O-methylcytidine with a 3'-phosphorothioate linkage
  modified_base 22: mod_base = OTHER; note = 2'-O-methylguanosine with a 3'-phosphorothioate linkage
  modified_base 23: mod_base = gm
tccaaattggacgaccctcgcgg

SEQ ID NO: 1192 - RNA, 21 nt, synthetic construct
  source 1..21: mol_type = other RNA
  modified_base 1: mod_base = OTHER; note = 2'-O-methylcytidine with a 3'-phosphorothioate linkage
  modified_base 2: mod_base = OTHER; note = 2'-O-methylguanosine with a 3'-phosphorothioate linkage
  modified_base 3: mod_base = OTHER; note = 2'-O-methyladenosine
  modified_base 4: mod_base = gm
  modified_base 5: mod_base = gm
  modified_base 6: mod_base = gm
  modified_base 7: mod_base = um
  modified_base 8: mod_base = cm
  modified_base 9: mod_base = OTHER; note = 2'-fluoroguanosine
  modified_base 10: mod_base = OTHER; note = 2'-fluorouridine
  modified_base 11: mod_base = OTHER; note = 2'-fluorocytidine
  modified_base 12: mod_base = cm
  modified_base 13: mod_base = OTHER; note = 2'-O-methyladenosine
  modified_base 14: mod_base = OTHER; note = 2'-O-methyladenosine
  modified_base 15: mod_base = um
  modified_base 16: mod_base = um
  modified_base 17: mod_base = um
  modified_base 18: mod_base = gm
  modified_base 19: mod_base = OTHER; note = 2'-O-methylguanosine with a 3'-phosphorothioate linkage
  modified_base 20: mod_base = OTHER; note = 2'-O-methylcytidine with a 3'-phosphorothioate linkage
  modified_base 21: mod_base = OTHER; note = 2'-O-methyladenosine
cgagggtcgtccaatttggca

SEQ ID NO: 1193 - RNA, 23 nt, synthetic construct
  source 1..23: mol_type = other RNA
  modified_base 1: mod_base = OTHER; note = 2'-O-methyluridine with a 3'-phosphorothioate linkage and a 5'-phosphate substitution
  modified_base 2: mod_base = OTHER; note = 2'-fluoroguanosine with a 3'-phosphorothioate linkage
  modified_base 3: mod_base = cm
  modified_base 4: mod_base = cm
  modified_base 5: mod_base = OTHER; note = 2'-fluoroadenosine
  modified_base 6: mod_base = OTHER; note = 2'-O-methyladenosine
  modified_base 7: mod_base = OTHER; note = 2'-fluoroadenosine
  modified_base 8: mod_base = um
  modified_base 9: mod_base = um
  modified_base 10: mod_base = gm
  modified_base 11: mod_base = gm
  modified_base 12: mod_base = OTHER; note = 2'-O-methyladenosine
  modified_base 13: mod_base = cm
  modified_base 14: mod_base = OTHER; note = 2'-fluoroguanosine
  modified_base 15: mod_base = OTHER; note = 2'-O-methyladenosine
  modified_base 16: mod_base = OTHER; note = 2'-fluorocytidine
  modified_base 17: mod_base = cm
  modified_base 18: mod_base = cm
  modified_base 19: mod_base = um
  modified_base 20: mod_base = cm
  modified_base 21: mod_base = OTHER; note = 2'-O-methylguanosine with a 3'-phosphorothioate linkage
  modified_base 22: mod_base = OTHER; note = 2'-O-methylcytidine with a 3'-phosphorothioate linkage
  modified_base 23: mod_base = gm
tgccaaattggacgaccctcgcg

SEQ ID NO: 1194 - RNA, 21 nt, synthetic construct
  source 1..21: mol_type = other RNA
  modified_base 1: mod_base = OTHER; note = 2'-O-methylguanosine with a 3'-phosphorothioate linkage
  modified_base 2: mod_base = OTHER; note = 2'-O-methyladenosine with a 3'-phosphorothioate linkage
  modified_base 3: mod_base = gm
  modified_base 4: mod_base = gm
  modified_base 5: mod_base = gm
  modified_base 6: mod_base = um
  modified_base 7: mod_base = cm
  modified_base 8: mod_base = gm
  modified_base 9: mod_base = OTHER; note = 2'-fluorouridine
  modified_base 10: mod_base = OTHER; note = 2'-fluorocytidine
  modified_base 11: mod_base = OTHER; note = 2'-fluorocytidine
  modified_base 12: mod_base = OTHER; note = 2'-O-methyladenosine
  modified_base 13: mod_base = OTHER; note = 2'-O-methyladenosine
  modified_base 14: mod_base = um
  modified_base 15: mod_base = um
  modified_base 16: mod_base = um
  modified_base 17: mod_base = gm
  modified_base 18: mod_base = gm
  modified_base 19: mod_base = OTHER; note = 2'-O-methylcytidine with a 3'-phosphorothioate linkage
  modified_base 20: mod_base = OTHER; note = 2'-O-methyladenosine with a 3'-phosphorothioate linkage
  modified_base 21: mod_base = OTHER; note = 2'-O-methyladenosine
gagggtcgtccaatttggcaa

SEQ ID NO: 1195 - RNA, 23 nt, synthetic construct
  source 1..23: mol_type = other RNA
  modified_base 1: mod_base = OTHER; note = 2'-O-methyluridine with a 3'-phosphorothioate linkage and a 5'-phosphate substitution
  modified_base 2: mod_base = OTHER; note = 2'-fluorouridine with a 3'-phosphorothioate linkage
  modified_base 3: mod_base = gm
  modified_base 4: mod_base = cm
  modified_base 5: mod_base = OTHER; note = 2'-fluorocytidine
  modified_base 6: mod_base = OTHER; note = 2'-O-methyladenosine
  modified_base 7: mod_base = OTHER; note = 2'-fluoroadenosine
  modified_base 8: mod_base = OTHER; note = 2'-O-methyladenosine
  modified_base 9: mod_base = um
  modified_base 10: mod_base = um
  modified_base 11: mod_base = gm
  modified_base 12: mod_base = gm
  modified_base 13: mod_base = OTHER; note = 2'-O-methyladenosine
  modified_base 14: mod_base = OTHER; note = 2'-fluorocytidine
  modified_base 15: mod_base = gm
  modified_base 16: mod_base = OTHER; note = 2'-fluoroadenosine
  modified_base 17: mod_base = cm
  modified_base 18: mod_base = cm
  modified_base 19: mod_base = cm
  modified_base 20: mod_base = um
  modified_base 21: mod_base = OTHER; note = 2'-O-methylcytidine with a 3'-phosphorothioate linkage
  modified_base 22: mod_base = OTHER; note = 2'-O-methylguanosine with a 3'-phosphorothioate linkage
  modified_base 23: mod_base = cm
ttgccaaattggacgaccctcgc

SEQ ID NO: 1196 - RNA, 21 nt, synthetic construct
  source 1..21: mol_type = other RNA
  modified_base 1: mod_base = OTHER; note = 2'-O-methylguanosine with a 3'-phosphorothioate linkage
  modified_base 2: mod_base = OTHER; note = 2'-O-methyluridine with a 3'-phosphorothioate linkage
  modified_base 3: mod_base = cm
  modified_base 4: mod_base = gm
  modified_base 5: mod_base = um
  modified_base 6: mod_base = cm
  modified_base 7: mod_base = cm
  modified_base 8: mod_base = OTHER; note = 2'-O-methyladenosine
  modified_base 9: mod_base = OTHER; note = 2'-fluoroadenosine
  modified_base 10: mod_base = OTHER; note = 2'-fluorouridine
  modified_base 11: mod_base = OTHER; note = 2'-fluorouridine
  modified_base 12: mod_base = um
  modified_base 13: mod_base = gm
  modified_base 14: mod_base = gm
  modified_base 15: mod_base = cm
  modified_base 16: mod_base = OTHER; note = 2'-O-methyladenosine
  modified_base 17: mod_base = gm
  modified_base 18: mod_base = cm
  modified_base 19: mod_base = OTHER; note = 2'-O-methyluridine with a 3'-phosphorothioate linkage
  modified_base 20: mod_base = OTHER; note = 2'-O-methylcytidine with a 3'-phosphorothioate linkage
  modified_base 21: mod_base = OTHER; note = 2'-O-methyladenosine
gtcgtccaatttggcagctca

SEQ ID NO: 1197 - RNA, 23 nt, synthetic construct
  source 1..23: mol_type = other RNA
  modified_base 1: mod_base = OTHER; note = 2'-O-methyluridine with a 3'-phosphorothioate linkage and a 5'-phosphate substitution
  modified_base 2: mod_base = OTHER; note = 2'-fluoroguanosine with a 3'-phosphorothioate linkage
  modified_base 3: mod_base = OTHER; note = 2'-O-methyladenosine
  modified_base 4: mod_base = gm
  modified_base 5: mod_base = OTHER; note = 2'-fluorocytidine
  modified_base 6: mod_base = um
  modified_base 7: mod_base = OTHER; note = 2'-fluoroguanosine
  modified_base 8: mod_base = cm
  modified_base 9: mod_base = cm
  modified_base 10: mod_base = OTHER; note = 2'-O-methyladenosine
  modified_base 11: mod_base = OTHER; note = 2'-O-methyladenosine
  modified_base 12: mod_base = OTHER; note = 2'-O-methyladenosine
  modified_base 13: mod_base = um
  modified_base 14: mod_base = OTHER; note = 2'-fluorouridine
  modified_base 15: mod_base = gm
  modified_base 16: mod_base = OTHER; note = 2'-fluoroguanosine
  modified_base 17: mod_base = OTHER; note = 2'-O-methyladenosine
  modified_base 18: mod_base = cm
  modified_base 19: mod_base = gm
  modified_base 20: mod_base = OTHER; note = 2'-O-methyladenosine
  modified_base 21: mod_base = OTHER; note = 2'-O-methylcytidine with a 3'-phosphorothioate linkage
  modified_base 22: mod_base = OTHER; note = 2'-O-methylcytidine with a 3'-phosphorothioate linkage
  modified_base 23: mod_base = cm
tgagctgccaaattggacgaccc

SEQ ID NO: 1198 - RNA, 21 nt, synthetic construct
  source 1..21: mol_type = other RNA
  modified_base 1: mod_base = OTHER; note = 2'-O-methyluridine with a 3'-phosphorothioate linkage
  modified_base 2: mod_base = OTHER; note = 2'-O-methylcytidine with a 3'-phosphorothioate linkage
  modified_base 3: mod_base = gm
  modified_base 4: mod_base = um
  modified_base 5: mod_base = cm
  modified_base 6: mod_base = cm
  modified_base 7: mod_base = OTHER; note = 2'-O-methyladenosine
  modified_base 8: mod_base = OTHER; note = 2'-O-methyladenosine
  modified_base 9: mod_base = OTHER; note = 2'-fluorouridine
  modified_base 10: mod_base = OTHER; note = 2'-fluorouridine
  modified_base 11: mod_base = OTHER; note = 2'-fluorouridine
  modified_base 12: mod_base = gm
  modified_base 13: mod_base = gm
  modified_base 14: mod_base = cm
  modified_base 15: mod_base = OTHER; note = 2'-O-methyladenosine
  modified_base 16: mod_base = gm
  modified_base 17: mod_base = cm
  modified_base 18: mod_base = um
  modified_base 19: mod_base = OTHER; note = 2'-O-methylcytidine with a 3'-phosphorothioate linkage
  modified_base 20: mod_base = OTHER; note = 2'-O-methyladenosine with a 3'-phosphorothioate linkage
  modified_base 21: mod_base = OTHER; note = 2'-O-methyladenosine
tcgtccaatttggcagctcaa

SEQ ID NO: 1199 - RNA, 23 nt, synthetic construct
  source 1..23: mol_type = other RNA
  modified_base 1: mod_base = OTHER; note = 2'-O-methyluridine with a 3'-phosphorothioate linkage and a 5'-phosphate substitution
  modified_base 2: mod_base = OTHER; note = 2'-fluorouridine with a 3'-phosphorothioate linkage
  modified_base 3: mod_base = gm
  modified_base 4: mod_base = OTHER; note = 2'-O-methyladenosine
  modified_base 5: mod_base = OTHER; note = 2'-fluoroguanosine
  modified_base 6: mod_base = cm
  modified_base 7: mod_base = OTHER; note = 2'-fluorouridine
  modified_base 8: mod_base = gm
  modified_base 9: mod_base = cm
  modified_base 10: mod_base = cm
  modified_base 11: mod_base = OTHER; note = 2'-O-methyladenosine
  modified_base 12: mod_base = OTHER; note = 2'-O-methyladenosine
  modified_base 13: mod_base = OTHER; note = 2'-O-methyladenosine
  modified_base 14: mod_base = OTHER; note = 2'-fluorouridine
  modified_base 15: mod_base = um
  modified_base 16: mod_base = OTHER; note = 2'-fluoroguanosine
  modified_base 17: mod_base = gm
  modified_base 18: mod_base = OTHER; note = 2'-O-methyladenosine
  modified_base 19: mod_base = cm
  modified_base 20: mod_base = gm
  modified_base 21: mod_base = OTHER; note = 2'-O-methyladenosine with a 3'-phosphorothioate linkage
  modified_base 22: mod_base = OTHER; note = 2'-O-methylcytidine with a 3'-phosphorothioate linkage
  modified_base 23: mod_base = cm
ttgagctgccaaattggacgacc

SEQ ID NO: 1200 - RNA, 21 nt, synthetic construct
  source 1..21: mol_type = other RNA
  modified_base 1: mod_base = OTHER; note = 2'-O-methylcytidine with a 3'-phosphorothioate linkage
  modified_base 2: mod_base = OTHER; note = 2'-O-methylguanosine with a 3'-phosphorothioate linkage
  modified_base 3: mod_base = um
  modified_base 4: mod_base = cm
  modified_base 5: mod_base = cm
  modified_base 6: mod_base = OTHER; note = 2'-O-methyladenosine
  modified_base 7: mod_base = OTHER; note = 2'-O-methyladenosine
  modified_base 8: mod_base = um
  modified_base 9: mod_base = OTHER; note = 2'-fluorouridine
  modified_base 10: mod_base = OTHER; note = 2'-fluorouridine
  modified_base 11: mod_base = OTHER; note = 2'-fluoroguanosine
  modified_base 12: mod_base = gm
  modified_base 13: mod_base = cm
  modified_base 14: mod_base = OTHER; note = 2'-O-methyladenosine
  modified_base 15: mod_base = gm
  modified_base 16: mod_base = cm
  modified_base 17: mod_base = um
  modified_base 18: mod_base = cm
  modified_base 19: mod_base = OTHER; note = 2'-O-methyladenosine with a 3'-phosphorothioate linkage
  modified_base 20: mod_base = OTHER; note = 2'-O-methylguanosine with a 3'-phosphorothioate linkage
  modified_base 21: mod_base = OTHER; note = 2'-O-methyladenosine
cgtccaatttggcagctcaga

SEQ ID NO: 1201 - RNA, 23 nt, synthetic construct
  source 1..23: mol_type = other RNA
  modified_base 1: mod_base = OTHER; note = 2'-O-methyluridine with a 3'-phosphorothioate linkage and a 5'-phosphate substitution
  modified_base 2: mod_base = OTHER; note = 2'-fluorocytidine with a 3'-phosphorothioate linkage
  modified_base 3: mod_base = um
  modified_base 4: mod_base = gm
  modified_base 5: mod_base = OTHER; note = 2'-fluoroadenosine
  modified_base 6: mod_base = gm
  modified_base 7: mod_base = OTHER; note = 2'-fluorocytidine
  modified_base 8: mod_base = um
  modified_base 9: mod_base = gm
  modified_base 10: mod_base = cm
  modified_base 11: mod_base = cm
  modified_base 12: mod_base = OTHER; note = 2'-O-methyladenosine
  modified_base 13: mod_base = OTHER; note = 2'-O-methyladenosine
  modified_base 14: mod_base = OTHER; note = 2'-fluoroadenosine
  modified_base 15: mod_base = um
  modified_base 16: mod_base = OTHER; note = 2'-fluorouridine
  modified_base 17: mod_base = gm
  modified_base 18: mod_base = gm
  modified_base 19: mod_base = OTHER; note = 2'-O-methyladenosine
  modified_base 20: mod_base = cm
  modified_base 21: mod_base = OTHER; note = 2'-O-methylguanosine with a 3'-phosphorothioate linkage
  modified_base 22: mod_base = OTHER; note = 2'-O-methyladenosine with a 3'-phosphorothioate linkage
  modified_base 23: mod_base = cm
tctgagctgccaaattggacgac

SEQ ID NO: 1202 - RNA, 21 nt, synthetic construct
  source 1..21: mol_type = other RNA
  modified_base 1: mod_base = OTHER; note = 2'-O-methyluridine with a 3'-phosphorothioate linkage
  modified_base 2: mod_base = OTHER; note = 2'-O-methylcytidine with a 3'-phosphorothioate linkage
  modified_base 3: mod_base = cm
  modified_base 4: mod_base = OTHER; note = 2'-O-methyladenosine
  modified_base 5: mod_base = OTHER; note = 2'-O-methyladenosine
  modified_base 6: mod_base = um
  modified_base 7: mod_base = um
  modified_base 8: mod_base = um
  modified_base 9: mod_base = OTHER; note = 2'-fluoroguanosine
  modified_base 10: mod_base = OTHER; note = 2'-fluoroguanosine
  modified_base 11: mod_base = OTHER; note = 2'-fluorocytidine
  modified_base 12: mod_base = OTHER; note = 2'-O-methyladenosine
  modified_base 13: mod_base = gm
  modified_base 14: mod_base = cm
  modified_base 15: mod_base = um
  modified_base 16: mod_base = cm
  modified_base 17: mod_base = OTHER; note = 2'-O-methyladenosine
  modified_base 18: mod_base = gm
  modified_base 19: mod_base = OTHER; note = 2'-O-methylcytidine with a 3'-phosphorothioate linkage
  modified_base 20: mod_base = OTHER; note = 2'-O-methylcytidine with a 3'-phosphorothioate linkage
  modified_base 21: mod_base = OTHER; note = 2'-O-methyladenosine
tccaatttggcagctcagcca

SEQ ID NO: 1203 - RNA, 23 nt, synthetic construct
  source 1..23: mol_type = other RNA
  modified_base 1: mod_base = OTHER; note = 2'-O-methyluridine with a 3'-phosphorothioate linkage and a 5'-phosphate substitution
  modified_base 2: mod_base = OTHER; note = 2'-fluoroguanosine with a 3'-phosphorothioate linkage
  modified_base 3: mod_base = gm
  modified_base 4: mod_base = cm
  modified_base 5: mod_base = OTHER; note = 2'-fluorouridine
  modified_base 6: mod_base = gm
  modified_base 7: mod_base = OTHER; note = 2'-fluoroadenosine
  modified_base 8: mod_base = gm
  modified_base 9: mod_base = cm
  modified_base 10: mod_base = um
  modified_base 11: mod_base = gm
  modified_base 12: mod_base = cm
  modified_base 13: mod_base = cm
  modified_base 14: mod_base = OTHER; note = 2'-fluoroadenosine
  modified_base 15: mod_base = OTHER; note = 2'-O-methyladenosine
  modified_base 16: mod_base = OTHER; note = 2'-fluoroadenosine
  modified_base 17: mod_base = um
  modified_base 18: mod_base = um
  modified_base 19: mod_base = gm
  modified_base 20: mod_base = gm
  modified_base 21: mod_base = OTHER; note = 2'-O-methyladenosine with a 3'-phosphorothioate linkage
  modified_base 22: mod_base = OTHER; note = 2'-O-methylcytidine with a 3'-phosphorothioate linkage
  modified_base 23: mod_base = gm
tggctgagctgccaaattggacg

SEQ ID NO: 1204 - RNA, 21 nt, synthetic construct
  source 1..21: mol_type = other RNA
  modified_base 1: mod_base = OTHER; note = 2'-O-methyladenosine with a 3'-phosphorothioate linkage
  modified_base 2: mod_base = OTHER; note = 2'-O-methyladenosine with a 3'-phosphorothioate linkage
  modified_base 3: mod_base = um
  modified_base 4: mod_base = um
  modified_base 5: mod_base = um
  modified_base 6: mod_base = gm
  modified_base 7: mod_base = gm
  modified_base 8: mod_base = cm
  modified_base 9: mod_base = OTHER; note = 2'-fluoroadenosine
  modified_base 10: mod_base = OTHER; note = 2'-fluoroguanosine
  modified_base 11: mod_base = OTHER; note = 2'-fluorocytidine
  modified_base 12: mod_base = um
  modified_base 13: mod_base = cm
  modified_base 14: mod_base = OTHER; note = 2'-O-methyladenosine
  modified_base 15: mod_base = gm
  modified_base 16: mod_base = cm
  modified_base 17: mod_base = cm
  modified_base 18: mod_base = OTHER; note = 2'-O-methyladenosine
  modified_base 19: mod_base = OTHER; note = 2'-O-methyluridine with a 3'-phosphorothioate linkage
  modified_base 20: mod_base = OTHER; note = 2'-O-methyluridine with a 3'-phosphorothioate linkage
  modified_base 21: mod_base = OTHER; note = 2'-O-methyladenosine
aatttggcagctcagccatta

SEQ ID NO: 1205 - RNA, 23 nt, synthetic construct
  source 1..23: mol_type = other RNA
  modified_base 1: mod_base = OTHER; note = 2'-O-methyluridine with a 3'-phosphorothioate linkage and a 5'-phosphate substitution
  modified_base 2: mod_base = OTHER; note = 2'-fluoroadenosine with a 3'-phosphorothioate linkage
  modified_base 3: mod_base = OTHER; note = 2'-O-methyladenosine
  modified_base 4: mod_base = um
  modified_base 5: mod_base = OTHER; note = 2'-fluoroguanosine
  modified_base 6: mod_base = gm
  modified_base 7: mod_base = OTHER; note = 2'-fluorocytidine
  modified_base 8: mod_base = um
  modified_base 9: mod_base = gm
  modified_base 10: mod_base = OTHER; note = 2'-O-methyladenosine
  modified_base 11: mod_base = gm
  modified_base 12: mod_base = cm
  modified_base 13: mod_base = um
  modified_base 14: mod_base = OTHER; note = 2'-fluoroguanosine
  modified_base 15: mod_base = cm
  modified_base 16: mod_base = OTHER; note = 2'-fluorocytidine
  modified_base 17: mod_base = OTHER; note = 2'-O-methyladenosine
  modified_base 18: mod_base = OTHER; note = 2'-O-methyladenosine
  modified_base 19: mod_base = OTHER; note = 2'-O-methyladenosine
  modified_base 20: mod_base = um
  modified_base 21: mod_base = OTHER; note = 2'-O-methyluridine with a 3'-phosphorothioate linkage
  modified_base 22: mod_base = OTHER; note = 2'-O-methylguanosine with a 3'-phosphorothioate linkage
  modified_base 23: mod_base = gm
taatggctgagctgccaaattgg

SEQ ID NO: 1206 - RNA, 21 nt, synthetic construct
  source 1..21: mol_type = other RNA
  modified_base 1: mod_base = OTHER; note = 2'-O-methyluridine with a 3'-phosphorothioate linkage
  modified_base 2: mod_base = OTHER; note = 2'-O-methyluridine with a 3'-phosphorothioate linkage
  modified_base 3: mod_base = gm
  modified_base 4: mod_base = gm
  modified_base 5: mod_base = cm
  modified_base 6: mod_base = OTHER; note = 2'-O-methyladenosine
  modified_base 7: mod_base = gm
  modified_base 8: mod_base = cm
  modified_base 9: mod_base = OTHER; note = 2'-fluorouridine
  modified_base 10: mod_base = OTHER; note = 2'-fluorocytidine
  modified_base 11: mod_base = OTHER; note = 2'-fluoroadenosine
  modified_base 12: mod_base = gm
  modified_base 13: mod_base = cm
  modified_base 14: mod_base = cm
  modified_base 15: mod_base = OTHER; note = 2'-O-methyladenosine
  modified_base 16: mod_base = um
  modified_base 17: mod_base = um
  modified_base 18: mod_base = um
  modified_base 19: mod_base = OTHER; note = 2'-O-methyluridine with a 3'-phosphorothioate linkage
  modified_base 20: mod_base = OTHER; note = 2'-O-methylguanosine with a 3'-phosphorothioate linkage
  modified_base 21: mod_base = OTHER; note = 2'-O-methyladenosine
ttggcagctcagccattttga

SEQ ID NO: 1207 - RNA, 23 nt, synthetic construct
  source 1..23: mol_type = other RNA
  modified_base 1: mod_base = OTHER; note = 2'-O-methyluridine with a 3'-phosphorothioate linkage and a 5'-phosphate substitution
  modified_base 2: mod_base = OTHER; note = 2'-fluorocytidine with a 3'-phosphorothioate linkage
  modified_base 3: mod_base = OTHER; note = 2'-O-methyladenosine
  modified_base 4: mod_base = OTHER; note = 2'-O-methyladenosine
  modified_base 5: mod_base = OTHER; note = 2'-fluoroadenosine
  modified_base 6: mod_base = OTHER; note = 2'-O-methyladenosine
  modified_base 7: mod_base = OTHER; note = 2'-fluorouridine
  modified_base 8: mod_base = gm
  modified_base 9: mod_base = gm
  modified_base 10: mod_base = cm
  modified_base 11: mod_base = um
  modified_base 12: mod_base = gm
  modified_base 13: mod_base = OTHER; note = 2'-O-methyladenosine
  modified_base 14: mod_base = OTHER; note = 2'-fluoroguanosine
  modified_base 15: mod_base = cm
  modified_base 16: mod_base = OTHER; note = 2'-fluorouridine
  modified_base 17: mod_base = gm
  modified_base 18: mod_base = cm
  modified_base 19: mod_base = cm
  modified_base 20: mod_base = OTHER; note = 2'-O-methyladenosine
  modified_base 21: mod_base = OTHER; note = 2'-O-methyladenosine with a 3'-phosphorothioate linkage
  modified_base 22: mod_base = OTHER; note = 2'-O-methyladenosine with a 3'-phosphorothioate linkage
  modified_base 23: mod_base = um
tcaaaatggctgagctgccaaat

SEQ ID NO: 1208 - RNA, 21 nt, synthetic construct
  source 1..21: mol_type = other RNA
  modified_base 1: mod_base = OTHER; note = 2'-O-methyluridine with a 3'-phosphorothioate linkage
  modified_base 2: mod_base = OTHER; note = 2'-O-methylguanosine with a 3'-phosphorothioate linkage
  modified_base 3: mod_base = gm
  modified_base 4: mod_base = cm
  modified_base 5: mod_base = OTHER; note = 2'-O-methyladenosine
  modified_base 6: mod_base = gm
  modified_base 7: mod_base = cm
  modified_base 8: mod_base = um
  modified_base 9: mod_base = OTHER; note = 2'-fluorocytidine
  modified_base 10: mod_base = OTHER; note = 2'-fluoroadenosine
  modified_base 11: mod_base = OTHER; note = 2'-fluoroguanosine
  modified_base 12: mod_base = cm
  modified_base 13: mod_base = cm
  modified_base 14: mod_base = OTHER; note = 2'-O-methyladenosine
  modified_base 15: mod_base = um
  modified_base 16: mod_base = um
  modified_base 17: mod_base = um
  modified_base 18: mod_base = um
  modified_base 19: mod_base = OTHER; note = 2'-O-methylguanosine with a 3'-phosphorothioate linkage
  modified_base 20: mod_base = OTHER; note = 2'-O-methylcytidine with a 3'-phosphorothioate linkage
  modified_base 21: mod_base = OTHER; note = 2'-O-methyladenosine
tggcagctcagccattttgca

SEQ ID NO: 1209 - RNA, 23 nt, synthetic construct
  source 1..23: mol_type = other RNA
  modified_base 1: mod_base = OTHER; note = 2'-O-methyluridine with a 3'-phosphorothioate linkage and a 5'-phosphate substitution
  modified_base 2: mod_base = OTHER; note = 2'-fluoroguanosine with a 3'-phosphorothioate linkage
  modified_base 3: mod_base = cm
  modified_base 4: mod_base = OTHER; note = 2'-O-methyladenosine
  modified_base 5: mod_base = OTHER; note = 2'-fluoroadenosine
  modified_base 6: mod_base = OTHER; note = 2'-O-methyladenosine
  modified_base 7: mod_base = OTHER; note = 2'-fluoroadenosine
  modified_base 8: mod_base = um
  modified_base 9: mod_base = gm
  modified_base 10: mod_base = gm
  modified_base 11: mod_base = cm
  modified_base 12: mod_base = um
  modified_base 13: mod_base = gm
  modified_base 14: mod_base = OTHER; note = 2'-fluoroadenosine
  modified_base 15: mod_base = gm
  modified_base 16: mod_base = OTHER; note = 2'-fluorocytidine
  modified_base 17: mod_base = um
  modified_base 18: mod_base = gm
  modified_base 19: mod_base = cm
  modified_base 20: mod_base = cm
  modified_base 21: mod_base = OTHER; note = 2'-O-methyladenosine with a 3'-phosphorothioate linkage
  modified_base 22: mod_base = OTHER; note = 2'-O-methyladenosine with a 3'-phosphorothioate linkage
  modified_base 23: mod_base = OTHER; note = 2'-O-methyladenosine
tgcaaaatggctgagctgccaaa

SEQ ID NO: 1210 - RNA, 21 nt, synthetic construct
  source 1..21: mol_type = other RNA
  modified_base 1: mod_base = OTHER; note = 2'-O-methylcytidine with a 3'-phosphorothioate linkage
  modified_base 2: mod_base = OTHER; note = 2'-O-methylcytidine with a 3'-phosphorothioate linkage
  modified_base 3: mod_base = gm
  modified_base 4: mod_base = OTHER; note = 2'-O-methyladenosine
  modified_base 5: mod_base = gm
  modified_base 6: mod_base = um
  modified_base 7: mod_base = um
  modified_base 8: mod_base = um
  modified_base 9: mod_base = OTHER; note = 2'-fluorouridine
  modified_base 10: mod_base = OTHER; note = 2'-fluoroadenosine
  modified_base 11: mod_base = OTHER; note = 2'-fluoroguanosine
  modified_base 12: mod_base = OTHER; note = 2'-O-methyladenosine
  modified_base 13: mod_base = OTHER; note = 2'-O-methyladenosine
  modified_base 14: mod_base = gm
  modified_base 15: mod_base = OTHER; note = 2'-O-methyladenosine
  modified_base 16: mod_base = OTHER; note = 2'-O-methyladenosine
  modified_base 17: mod_base = gm
  modified_base 18: mod_base = OTHER; note = 2'-O-methyladenosine
  modified_base 19: mod_base = OTHER; note = 2'-O-methyladenosine with a 3'-phosphorothioate linkage
  modified_base 20: mod_base = OTHER; note = 2'-O-methylguanosine with a 3'-phosphorothioate linkage
  modified_base 21: mod_base = OTHER; note = 2'-O-methyladenosine
ccgagttttagaagaagaaga

SEQ ID NO: 1211 - RNA, 23 nt, synthetic construct
  source 1..23: mol_type = other RNA
  modified_base 1: mod_base = OTHER; note = 2'-O-methyluridine with a 3'-phosphorothioate linkage and a 5'-phosphate substitution
  modified_base 2: mod_base = OTHER; note = 2'-fluorocytidine with a 3'-phosphorothioate linkage
  modified_base 3: mod_base = um
  modified_base 4: mod_base = um
  modified_base 5: mod_base = OTHER; note = 2'-fluorocytidine
  modified_base 6: mod_base = um
  modified_base 7: mod_base = OTHER; note = 2'-fluorouridine
  modified_base 8: mod_base = cm
  modified_base 9: mod_base = um
  modified_base 10: mod_base = um
  modified_base 11: mod_base = cm
  modified_base 12: mod_base = um
  modified_base 13: mod_base = OTHER; note = 2'-O-methyladenosine
  modified_base 14: mod_base = OTHER; note = 2'-fluoroadenosine
  modified_base 15: mod_base = OTHER; note = 2'-O-methyladenosine
  modified_base 16: mod_base = OTHER; note = 2'-fluoroadenosine
  modified_base 17: mod_base = cm
  modified_base 18: mod_base = um
  modified_base 19: mod_base = cm
  modified_base 20: mod_base = gm
  modified_base 21: mod_base = OTHER; note = 2'-O-methylguanosine with a 3'-phosphorothioate linkage
  modified_base 22: mod_base = OTHER; note = 2'-O-methylguanosine with a 3'-phosphorothioate linkage
  modified_base 23: mod_base = cm
tcttcttcttctaaaactcgggc

SEQ ID NO: 1212 - RNA, 21 nt, synthetic construct
  source 1..21: mol_type = other RNA
  modified_base 1: mod_base = OTHER; note = 2'-O-methyladenosine with a 3'-phosphorothioate linkage
  modified_base 2: mod_base = OTHER; note = 2'-O-methylguanosine with a 3'-phosphorothioate linkage
  modified_base 3: mod_base = OTHER; note = 2'-O-methyladenosine
  modified_base 4: mod_base = gm
  modified_base 5: mod_base = gm
  modified_base 6: mod_base = gm
  modified_base 7: mod_base = um
  modified_base 8: mod_base = cm
  modified_base 9: mod_base = OTHER; note = 2'-fluoroadenosine
  modified_base 10: mod_base = OTHER; note = 2'-fluoroadenosine
  modified_base 11: mod_base = OTHER; note = 2'-fluoroguanosine
  modified_base 12: mod_base = OTHER; note = 2'-O-methyladenosine
  modified_base 13: mod_base = um
  modified_base 14: mod_base = gm
  modified_base 15: mod_base = OTHER; note = 2'-O-methyladenosine
  modified_base 16: mod_base = um
  modified_base 17: mod_base = um
  modified_base 18: mod_base = OTHER; note = 2'-O-methyladenosine
  modified_base 19: mod_base = OTHER; note = 2'-O-methyluridine with a 3'-phosphorothioate linkage
  modified_base 20: mod_base = OTHER; note = 2'-O-methylguanosine with a 3'-phosphorothioate linkage
  modified_base 21: mod_base = OTHER; note = 2'-O-methyladenosine
agagggtcaagatgattatga

SEQ ID NO: 1213 - RNA, 23 nt, synthetic construct
  source 1..23: mol_type = other RNA
  modified_base 1: mod_base = OTHER; note = 2'-O-methyluridine with a 3'-phosphorothioate linkage and a 5'-phosphate substitution
  modified_base 2: mod_base = OTHER; note = 2'-fluorocytidine with a 3'-phosphorothioate linkage
  modified_base 3: mod_base = OTHER; note = 2'-O-methyladenosine
  modified_base 4: mod_base = um
  modified_base 5: mod_base = OTHER; note = 2'-fluoroadenosine
  modified_base 6: mod_base = OTHER; note = 2'-O-methyladenosine
  modified_base 7: mod_base = OTHER; note = 2'-fluorouridine
  modified_base 8: mod_base = cm
  modified_base 9: mod_base = OTHER; note = 2'-O-methyladenosine
  modified_base 10: mod_base = um
  modified_base 11: mod_base = cm
  modified_base 12: mod_base = um
  modified_base 13: mod_base = um
  modified_base 14: mod_base = OTHER; note = 2'-fluoroguanosine
  modified_base 15: mod_base = OTHER; note = 2'-O-methyladenosine
  modified_base 16: mod_base = OTHER; note = 2'-fluorocytidine
  modified_base 17: mod_base = cm
  modified_base 18: mod_base = cm
  modified_base 19: mod_base = um
  modified_base 20: mod_base = cm
  modified_base 21: mod_base = OTHER; note = 2'-O-methyluridine with a 3'-phosphorothioate linkage
  modified_base 22: mod_base = OTHER; note = 2'-O-methylguanosine with a 3'-phosphorothioate linkage
  modified_base 23: mod_base = OTHER; note = 2'-O-methyladenosine
tcataatcatcttgaccctctga

SEQ ID NO: 1214 - RNA, 21 nt, synthetic construct
  source 1..21: mol_type = other RNA
  modified_base 1: mod_base = OTHER; note = 2'-O-methylguanosine with a 3'-phosphorothioate linkage
  modified_base 2: mod_base = OTHER; note = 2'-O-methylguanosine with a 3'-phosphorothioate linkage
  modified_base 3: mod_base = gm
  modified_base 4: mod_base = um
  modified_base 5: mod_base = cm
  modified_base 6: mod_base = OTHER; note = 2'-O-methyladenosine
  modified_base 7: mod_base = OTHER; note = 2'-O-methyladenosine
  modified_base 8: mod_base = gm
  modified_base 9: mod_base = OTHER; note = 2'-fluoroadenosine
  modified_base 10: mod_base = OTHER; note = 2'-fluorouridine
  modified_base 11: mod_base = OTHER; note = 2'-fluoroguanosine
  modified_base 12: mod_base = OTHER; note = 2'-O-methyladenosine
  modified_base 13: mod_base = um
  modified_base 14: mod_base = um
  modified_base 15: mod_base = OTHER; note = 2'-O-methyladenosine
  modified_base 16: mod_base = um
  modified_base 17: mod_base = gm
  modified_base 18: mod_base = um
  modified_base 19: mod_base = OTHER; note = 2'-O-methylcytidine with a 3'-phosphorothioate linkage
  modified_base 20: mod_base = OTHER; note = 2'-O-methyluridine with a 3'-phosphorothioate linkage
  modified_base 21: mod_base = OTHER; note = 2'-O-methyladenosine
gggtcaagatgattatgtcta

SEQ ID NO: 1215 - RNA, 23 nt, synthetic construct
  source 1..23: mol_type = other RNA
  modified_base 1: mod_base = OTHER; note = 2'-O-methyluridine with a 3'-phosphorothioate linkage and a 5'-phosphate substitution
  modified_base 2: mod_base = OTHER; note = 2'-fluoroadenosine with a 3'-phosphorothioate linkage
  modified_base 3: mod_base = gm
  modified_base 4: mod_base = OTHER; note = 2'-O-methyladenosine
  modified_base 5: mod_base = OTHER; note = 2'-fluorocytidine
  modified_base 6: mod_base = OTHER; note = 2'-O-methyladenosine
  modified_base 7: mod_base = OTHER; note = 2'-fluorouridine
  modified_base 8: mod_base = OTHER; note = 2'-O-methyladenosine
  modified_base 9: mod_base = OTHER; note = 2'-O-methyladenosine
  modified_base 10: mod_base = um
  modified_base 11: mod_base = cm
  modified_base 12: mod_base = OTHER; note = 2'-O-methyladenosine
  modified_base 13: mod_base = um
  modified_base 14: mod_base = OTHER; note = 2'-fluorocytidine
  modified_base 15: mod_base = um
  modified_base 16: mod_base = OTHER; note = 2'-fluorouridine
  modified_base 17: mod_base = gm
  modified_base 18: mod_base = OTHER; note = 2'-O-methyladenosine
  modified_base 19: mod_base = cm
  modified_base 20: mod_base = cm
  modified_base 21: mod_base = OTHER; note = 2'-O-methylcytidine with a 3'-phosphorothioate linkage
  modified_base 22: mod_base = OTHER; note = 2'-O-methyluridine with a 3'-phosphorothioate linkage
  modified_base 23: mod_base = cm
tagacataatcatcttgaccctc

SEQ ID NO: 1216 - RNA, 21 nt, synthetic construct
  source 1..21: mol_type = other RNA
  modified_base 1: mod_base = OTHER; note = 2'-O-methyladenosine with a 3'-phosphorothioate linkage
  modified_base 2: mod_base = OTHER; note = 2'-O-methylguanosine with a 3'-phosphorothioate linkage
  modified_base 3: mod_base = um
  modified_base 4: mod_base = cm
  modified_base 5: mod_base = gm
  modified_base 6: mod_base = cm
  modified_base 7: mod_base = um
  modified_base 8: mod_base = gm
  modified_base 9: mod_base = OTHER; note = 2'-fluoroguanosine
  modified_base 10: mod_base = OTHER; note = 2'-fluoroadenosine
  modified_base 11: mod_base = OTHER; note = 2'-fluorouridine
  modified_base 12: mod_base = OTHER; note = 2'-O-methyladenosine
  modified_base 13: mod_base = gm
  modified_base 14: mod_base = cm
  modified_base 15: mod_base = um
  modified_base 16: mod_base = gm
  modified_base 17: mod_base = OTHER; note = 2'-O-methyladenosine
  modified_base 18: mod_base = um
  modified_base 19: mod_base = OTHER; note = 2'-O-methylcytidine with a 3'-phosphorothioate linkage
  modified_base 20: mod_base = OTHER; note = 2'-O-methylcytidine with a 3'-phosphorothioate linkage
  modified_base 21: mod_base = OTHER; note = 2'-O-methyladenosine
agtcgctggatagctgatcca

SEQ ID NO: 1217 - RNA, 23 nt, synthetic construct
  source 1..23: mol_type = other RNA
  modified_base 1: mod_base = OTHER; note = 2'-O-methyluridine with a 3'-phosphorothioate linkage and a 5'-phosphate substitution
  modified_base 2: mod_base = OTHER; note = 2'-fluoroguanosine with a 3'-phosphorothioate linkage
  modified_base 3: mod_base = gm
  modified_base 4: mod_base = OTHER; note = 2'-O-methyladenosine
  modified_base 5: mod_base = OTHER; note = 2'-fluorouridine
  modified_base 6: mod_base = cm
  modified_base 7: mod_base = OTHER; note = 2'-fluoroadenosine
  modified_base 8: mod_base = gm
  modified_base 9: mod_base = cm
  modified_base 10: mod_base = um
  modified_base 11: mod_base = OTHER; note = 2'-O-methyladenosine
  modified_base 12: mod_base = um
  modified_base 13: mod_base = cm
  modified_base 14: mod_base = OTHER; note = 2'-fluorocytidine
  modified_base 15: mod_base = OTHER; note = 2'-O-methyladenosine
  modified_base 16: mod_base = OTHER; note = 2'-fluoroguanosine
  modified_base 17: mod_base = cm
  modified_base 18: mod_base = gm
  modified_base 19: mod_base = OTHER; note = 2'-O-methyladenosine
  modified_base 20: mod_base = cm
  modified_base 21: mod_base = OTHER; note = 2'-O-methyluridine with a 3'-phosphorothioate linkage
  modified_base 22: mod_base = OTHER; note = 2'-O-methylguanosine with a 3'-phosphorothioate linkage
  modified_base 23: mod_base = um
tggatcagctatccagcgactgt

SEQ ID NO: 1218 - RNA, 21 nt, synthetic construct
  source 1..21: mol_type = other RNA
  modified_base 1: mod_base = OTHER; note = 2'-O-methylguanosine with a 3'-phosphorothioate linkage
  modified_base 2: mod_base = OTHER; note = 2'-O-methyluridine with a 3'-phosphorothioate linkage
  modified_base 3: mod_base = cm
  modified_base 4: mod_base = gm
  modified_base 5: mod_base = cm
  modified_base 6: mod_base = um
  modified_base 7: mod_base = gm
  modified_base 8: mod_base = gm
  modified_base 9: mod_base = OTHER; note = 2'-fluoroadenosine
  modified_base 10: mod_base = OTHER; note = 2'-fluorouridine
  modified_base 11: mod_base = OTHER; note = 2'-fluoroadenosine
  modified_base 12: mod_base = gm
  modified_base 13: mod_base = cm
  modified_base 14: mod_base = um
  modified_base 15: mod_base = gm
  modified_base 16: mod_base = OTHER; note = 2'-O-methyladenosine
  modified_base 17: mod_base = um
  modified_base 18: mod_base = cm
  modified_base 19: mod_base = OTHER; note = 2'-O-methylcytidine with a 3'-phosphorothioate linkage
  modified_base 20: mod_base = OTHER; note = 2'-O-methyluridine with a 3'-phosphorothioate linkage
  modified_base 21: mod_base = OTHER; note = 2'-O-methyladenosine
gtcgctggatagctgatccta

SEQ ID NO: 1219 - RNA, 23 nt, synthetic construct
  source 1..23: mol_type = other RNA
  modified_base 1: mod_base = OTHER; note = 2'-O-methyluridine with a 3'-phosphorothioate linkage and a 5'-phosphate substitution
  modified_base 2: mod_base = OTHER; note = 2'-fluoroadenosine with a 3'-phosphorothioate linkage
  modified_base 3: mod_base = gm
  modified_base 4: mod_base = gm
  modified_base 5: mod_base = OTHER; note = 2'-fluoroadenosine
  modified_base 6: mod_base = um
  modified_base 7: mod_base = OTHER; note = 2'-fluorocytidine
  modified_base 8: mod_base = OTHER; note = 2'-O-methyladenosine
  modified_base 9: mod_base = gm
  modified_base 10: mod_base = cm
  modified_base 11: mod_base = um
  modified_base 12: mod_base = OTHER; note = 2'-O-methyladenosine
  modified_base 13: mod_base = um
  modified_base 14: mod_base = OTHER; note = 2'-fluorocytidine
  modified_base 15: mod_base = cm
  modified_base 16: mod_base = OTHER; note = 2'-fluoroadenosine
  modified_base 17: mod_base = gm
  modified_base 18: mod_base = cm
  modified_base 19: mod_base = gm
  modified_base 20: mod_base = OTHER; note = 2'-O-methyladenosine
  modified_base 21: mod_base = OTHER; note = 2'-O-methylcytidine with a 3'-phosphorothioate linkage
  modified_base 22: mod_base = OTHER; note = 2'-O-methyluridine with a 3'-phosphorothioate linkage
  modified_base 23: mod_base = gm
taggatcagctatccagcgactg

SEQ ID NO: 1220 - RNA, 21 nt, synthetic construct
  source 1..21: mol_type = other RNA
  modified_base 1: mod_base = OTHER; note = 2'-O-methyluridine with a 3'-phosphorothioate linkage
  modified_base 2: mod_base = OTHER; note = 2'-O-methylcytidine with a 3'-phosphorothioate linkage
  modified_base 3: mod_base = gm
  modified_base 4: mod_base = cm
  modified_base 5: mod_base = um
  modified_base 6: mod_base = gm
  modified_base 7: mod_base = gm
  modified_base 8: mod_base = OTHER; note = 2'-O-methyladenosine
  modified_base 9: mod_base = OTHER; note = 2'-fluorouridine
  modified_base 10: mod_base = OTHER; note = 2'-fluoroadenosine
  modified_base 11: mod_base = OTHER; note = 2'-fluoroguanosine
  modified_base 12: mod_base = cm
  modified_base 13: mod_base = um
  modified_base 14: mod_base = gm
  modified_base 15: mod_base = OTHER; note = 2'-O-methyladenosine
  modified_base 16: mod_base = um
  modified_base 17: mod_base = cm
  modified_base 18: mod_base = cm
  modified_base 19: mod_base = OTHER; note = 2'-O-methyluridine with a 3'-phosphorothioate linkage
  modified_base 20: mod_base = OTHER; note = 2'-O-methyluridine with a 3'-phosphorothioate linkage
  modified_base 21: mod_base = OTHER; note = 2'-O-methyladenosine
tcgctggatagctgatcctta

SEQ ID NO: 1221 - RNA, 23 nt, synthetic construct
  source 1..23: mol_type = other RNA
  modified_base 1: mod_base = OTHER; note = 2'-O-methyluridine with a 3'-phosphorothioate linkage and a 5'-phosphate substitution
  modified_base 2: mod_base = OTHER; note = 2'-fluoroadenosine with a 3'-phosphorothioate linkage
  modified_base 3: mod_base = OTHER; note = 2'-O-methyladenosine
  modified_base 4: mod_base = gm
  modified_base 5: mod_base = OTHER; note = 2'-fluoroguanosine
  modified_base 6: mod_base = OTHER; note = 2'-O-methyladenosine
  modified_base 7: mod_base = OTHER; note = 2'-fluorouridine
  modified_base 8: mod_base = cm
  modified_base 9: mod_base = OTHER; note = 2'-O-methyladenosine
  modified_base 10: mod_base = gm
  modified_base 11: mod_base = cm
  modified_base 12: mod_base = um
  modified_base 13: mod_base = OTHER; note = 2'-O-methyladenosine
  modified_base 14: mod_base = OTHER; note = 2'-fluorouridine
  modified_base 15: mod_base = cm
  modified_base 16: mod_base = OTHER; note = 2'-fluorocytidine
  modified_base 17: mod_base = OTHER; note = 2'-O-methyladenosine
  modified_base 18: mod_base = gm
  modified_base 19: mod_base = cm
  modified_base 20: mod_base = gm
  modified_base 21: mod_base = OTHER; note = 2'-O-methyladenosine with a 3'-phosphorothioate linkage
  modified_base 22: mod_base = OTHER; note = 2'-O-methylcytidine with a 3'-phosphorothioate linkage
  modified_base 23: mod_base = um
taaggatcagctatccagcgact

SEQ ID NO: 1222 - RNA, 21 nt, synthetic construct
  source 1..21: mol_type = other RNA
  modified_base 1: mod_base = OTHER; note = 2'-O-methyladenosine with a 3'-phosphorothioate linkage
  modified_base 2: mod_base = OTHER; note = 2'-O-methyladenosine with a 3'-phosphorothioate linkage
  modified_base 3: mod_base = OTHER; note = 2'-O-methyladenosine
  modified_base 4: mod_base = OTHER; note = 2'-O-methyladenosine
  modified_base 5: mod_base = gm
  modified_base 6: mod_base = um
  modified_base 7: mod_base = um
  modified_base 8: mod_base = gm
  modified_base 9: mod_base = OTHER; note = 2'-fluoroadenosine
  modified_base 10: mod_base = OTHER; note = 2'-fluoroguanosine
  modified_base 11: mod_base = OTHER; note = 2'-fluoroguanosine
  modified_base 12: mod_base = um
  modified_base 13: mod_base = um
  modified_base 14: mod_base = OTHER; note = 2'-O-methyladenosine
  modified_base 15: mod_base = um
  modified_base 16: mod_base = OTHER; note = 2'-O-methyladenosine
  modified_base 17: mod_base = OTHER; note = 2'-O-methyladenosine
  modified_base 18: mod_base = OTHER; note = 2'-O-methyladenosine
  modified_base 19: mod_base = OTHER; note = 2'-O-methyladenosine with a 3'-phosphorothioate linkage
  modified_base 20: mod_base = OTHER; note = 2'-O-methylcytidine with a 3'-phosphorothioate linkage
  modified_base 21: mod_base = OTHER; note = 2'-O-methyladenosine
aaaagttgaggttataaaaca

SEQ ID NO: 1223 - RNA, 23 nt, synthetic construct
  source 1..23: mol_type = other RNA
  modified_base 1: mod_base = OTHER; note = 2'-O-methyluridine with a 3'-phosphorothioate linkage and a 5'-phosphate substitution
  modified_base 2: mod_base = OTHER; note = 2'-fluoroguanosine with a 3'-phosphorothioate linkage
  modified_base 3: mod_base = um
  modified_base 4: mod_base = um
  modified_base 5: mod_base = OTHER; note = 2'-fluorouridine
  modified_base 6: mod_base = um
  modified_base 7: mod_base = OTHER; note = 2'-fluoroadenosine
  modified_base 8: mod_base = um
  modified_base 9: mod_base = OTHER; note = 2'-O-methyladenosine
  modified_base 10: mod_base = OTHER; note = 2'-O-methyladenosine
  modified_base 11: mod_base = cm
  modified_base 12: mod_base = cm
  modified_base 13: mod_base = um
  modified_base 14: mod_base = OTHER; note = 2'-fluorocytidine
  modified_base 15: mod_base = OTHER; note = 2'-O-methyladenosine
  modified_base 16: mod_base = OTHER; note = 2'-fluoroadenosine
  modified_base 17: mod_base = cm
  modified_base 18: mod_base = um
  modified_base 19: mod_base = um
  modified_base 20: mod_base = um
  modified_base 21: mod_base = OTHER; note = 2'-O-methyluridine with a 3'-phosphorothioate linkage
  modified_base 22: mod_base = OTHER; note = 2'-O-methylcytidine with a 3'-phosphorothioate linkage
  modified_base 23: mod_base = um
tgttttataacctcaacttttct

SEQ ID NO: 1224 - RNA, 21 nt, synthetic construct
  source 1..21: mol_type = other RNA
  modified_base 1: mod_base = OTHER; note = 2'-O-methyladenosine with a 3'-phosphorothioate linkage
  modified_base 2: mod_base = OTHER; note = 2'-O-methyladenosine with a 3'-phosphorothioate linkage
  modified_base 3: mod_base = OTHER; note = 2'-O-methyladenosine
  modified_base 4: mod_base = gm
  modified_base 5: mod_base = um
  modified_base 6: mod_base = um
  modified_base 7: mod_base = gm
  modified_base 8: mod_base = OTHER; note = 2'-O-methyladenosine
  modified_base 9: mod_base = OTHER; note = 2'-fluoroguanosine
  modified_base 10: mod_base = OTHER; note = 2'-fluoroguanosine
  modified_base 11: mod_base = OTHER; note = 2'-fluorouridine
  modified_base 12: mod_base = um
  modified_base 13: mod_base = OTHER; note = 2'-O-methyladenosine
  modified_base 14: mod_base = um
  modified_base 15: mod_base = OTHER; note = 2'-O-methyladenosine
  modified_base 16: mod_base = OTHER; note = 2'-O-methyladenosine
  modified_base 17: mod_base = OTHER; note = 2'-O-methyladenosine
  modified_base 18: mod_base = OTHER; note = 2'-O-methyladenosine
  modified_base 19: mod_base = OTHER; note = 2'-O-methylcytidine with a 3'-phosphorothioate linkage
  modified_base 20: mod_base = OTHER; note = 2'-O-methylcytidine with a 3'-phosphorothioate linkage
  modified_base 21: mod_base = OTHER; note = 2'-O-methyladenosine
aaagttgaggttataaaacca

SEQ ID NO: 1225 - RNA, 23 nt, synthetic construct
  source 1..23: mol_type = other RNA
  modified_base 1: mod_base = OTHER; note = 2'-O-methyluridine with a 3'-phosphorothioate linkage and a 5'-phosphate substitution
  modified_base 2: mod_base = OTHER; note = 2'-fluoroguanosine with a 3'-phosphorothioate linkage
  modified_base 3: mod_base = gm
  modified_base 4: mod_base = um
  modified_base 5: mod_base = OTHER; note = 2'-fluorouridine
  modified_base 6: mod_base = um
  modified_base 7: mod_base = OTHER; note = 2'-fluorouridine
  modified_base 8: mod_base = OTHER; note = 2'-O-methyladenosine
  modified_base 9: mod_base = um
  modified_base 10: mod_base = OTHER; note = 2'-O-methyladenosine
  modified_base 11: mod_base = OTHER; note = 2'-O-methyladenosine
  modified_base 12: mod_base = cm
  modified_base 13: mod_base = cm
  modified_base 14: mod_base = OTHER; note = 2'-fluorouridine
  modified_base 15: mod_base = cm
  modified_base 16: mod_base = OTHER; note = 2'-fluoroadenosine
  modified_base 17: mod_base = OTHER; note = 2'-O-methyladenosine
  modified_base 18: mod_base = cm
  modified_base 19: mod_base = um
  modified_base 20: mod_base = um
  modified_base 21: mod_base = OTHER; note = 2'-O-methyluridine with a 3'-phosphorothioate linkage
  modified_base 22: mod_base = OTHER; note = 2'-O-methyluridine with a 3'-phosphorothioate linkage
  modified_base 23: mod_base = cm
tggttttataacctcaacttttc

SEQ ID NO: 1226 - RNA, 21 nt, synthetic construct
  source 1..21: mol_type = other RNA
  modified_base 1: mod_base = OTHER; note = 2'-O-methyluridine with a 3'-phosphorothioate linkage
  modified_base 2: mod_base = OTHER; note = 2'-O-methylguanosine with a 3'-phosphorothioate linkage
  modified_base 3: mod_base = gm
  modified_base 4: mod_base = OTHER; note = 2'-O-methyladenosine
  modified_base 5: mod_base = um
  modified_base 6: mod_base = OTHER; note = 2'-O-methyladenosine
  modified_base 7: mod_base = um
  modified_base 8: mod_base = OTHER; note = 2'-O-methyladenosine
  modified_base 9: mod_base = OTHER; note = 2'-fluorouridine
  modified_base 10: mod_base = OTHER; note = 2'-fluoroguanosine
  modified_base 11: mod_base = OTHER; note = 2'-fluorocytidine
  modified_base 12: mod_base = cm
  modified_base 13: mod_base = cm
  modified_base 14: mod_base = OTHER; note = 2'-O-methyladenosine
  modified_base 15: mod_base = um
  modified_base 16: mod_base = cm
  modified_base 17: mod_base = cm
  modified_base 18: mod_base = cm
  modified_base 19: mod_base = OTHER; note = 2'-O-methyluridine with a 3'-phosphorothioate linkage
  modified_base 20: mod_base = OTHER; note = 2'-O-methylguanosine with a 3'-phosphorothioate linkage
  modified_base 21: mod_base = OTHER; note = 2'-O-methyladenosine
tggatatatgcccatccctga

SEQ ID NO: 1227 - RNA, 23 nt, synthetic construct
  source 1..23: mol_type = other RNA
  modified_base 1: mod_base = OTHER; note = 2'-O-methyluridine with a 3'-phosphorothioate linkage and a 5'-phosphate substitution
  modified_base 2: mod_base = OTHER; note = 2'-fluorocytidine with a 3'-phosphorothioate linkage
  modified_base 3: mod_base = OTHER; note = 2'-O-methyladenosine
  modified_base 4: mod_base = gm
  modified_base 5: mod_base = OTHER; note = 2'-fluoroguanosine
  modified_base 6: mod_base = gm
  modified_base 7: mod_base = OTHER; note = 2'-fluoroadenosine
  modified_base 8: mod_base = um
  modified_base 9: mod_base = gm
  modified_base 10: mod_base = gm
  modified_base 11: mod_base = gm
  modified_base 12: mod_base = cm
  modified_base 13: mod_base = OTHER; note = 2'-O-methyladenosine
  modified_base 14: mod_base = OTHER; note = 2'-fluorouridine
  modified_base 15: mod_base = OTHER; note = 2'-O-methyladenosine
  modified_base 16: mod_base = OTHER; note = 2'-fluorouridine
  modified_base 17: mod_base = OTHER; note = 2'-O-methyladenosine
  modified_base 18: mod_base = um
  modified_base 19: mod_base = cm
  modified_base 20: mod_base = cm
  modified_base 21: mod_base = OTHER; note = 2'-O-methyladenosine with a 3'-phosphorothioate linkage
  modified_base 22: mod_base = OTHER; note = 2'-O-methyladenosine with a 3'-phosphorothioate linkage
  modified_base 23: mod_base = um
tcagggatgggcatatatccaat

SEQ ID NO: 1228 - RNA, 21 nt, synthetic construct
  source 1..21: mol_type = other RNA
  modified_base 1: mod_base = OTHER; note = 2'-O-methylguanosine with a 3'-phosphorothioate linkage
  modified_base 2: mod_base = OTHER; note = 2'-O-methylguanosine with a 3'-phosphorothioate linkage
  modified_base 3: mod_base = OTHER; note = 2'-O-methyladenosine
  modified_base 4: mod_base = um
  modified_base 5: mod_base = OTHER; note = 2'-O-methyladenosine
  modified_base 6: mod_base = um
  modified_base 7: mod_base = OTHER; note = 2'-O-methyladenosine
  modified_base 8: mod_base = um
  modified_base 9: mod_base = OTHER; note = 2'-fluoroguanosine
  modified_base 10: mod_base = OTHER; note = 2'-fluorocytidine
  modified_base 11: mod_base = OTHER; note = 2'-fluorocytidine
  modified_base 12: mod_base = cm
  modified_base 13: mod_base = OTHER; note = 2'-O-methyladenosine
  modified_base 14: mod_base = um
  modified_base 15: mod_base = cm
  modified_base 16: mod_base = cm
  modified_base 17: mod_base = cm
  modified_base 18: mod_base = um
  modified_base 19: mod_base = OTHER; note = 2'-O-methylguanosine with a 3'-phosphorothioate linkage
  modified_base 20: mod_base = OTHER; note = 2'-O-methyluridine with a 3'-phosphorothioate linkage
  modified_base 21: mod_base = OTHER; note = 2'-O-methyladenosine
ggatatatgcccatccctgta

SEQ ID NO: 1229 - RNA, 23 nt, synthetic construct
  source 1..23: mol_type = other RNA
  modified_base 1: mod_base = OTHER; note = 2'-O-methyluridine with a 3'-phosphorothioate linkage and a 5'-phosphate substitution
  modified_base 2: mod_base = OTHER; note = 2'-fluoroadenosine with a 3'-phosphorothioate linkage
  modified_base 3: mod_base = cm
  modified_base 4: mod_base = OTHER; note = 2'-O-methyladenosine
  modified_base 5: mod_base = OTHER; note = 2'-fluoroguanosine
  modified_base 6: mod_base = gm
  modified_base 7: mod_base = OTHER; note = 2'-fluoroguanosine
  modified_base 8: mod_base = OTHER; note = 2'-O-methyladenosine
  modified_base 9: mod_base = um
  modified_base 10: mod_base = gm
  modified_base 11: mod_base = gm
  modified_base 12: mod_base = gm
  modified_base 13: mod_base = cm
  modified_base 14: mod_base = OTHER; note = 2'-fluoroadenosine
  modified_base 15: mod_base = um
  modified_base 16: mod_base = OTHER; note = 2'-fluoroadenosine
  modified_base 17: mod_base = um
  modified_base 18: mod_base = OTHER; note = 2'-O-methyladenosine
  modified_base 19: mod_base = um
  modified_base 20: mod_base = cm
  modified_base 21: mod_base = OTHER; note = 2'-O-methylcytidine with a 3'-phosphorothioate linkage
  modified_base 22: mod_base = OTHER; note = 2'-O-methyladenosine with a 3'-phosphorothioate linkage
  modified_base 23: mod_base = OTHER; note = 2'-O-methyladenosine
tacagggatgggcatatatccaa

SEQ ID NO: 1230 - RNA, 21 nt, synthetic construct
  source 1..21: mol_type = other RNA
  modified_base 1: mod_base = OTHER; note = 2'-O-methyladenosine with a 3'-phosphorothioate linkage
  modified_base 2: mod_base = OTHER; note = 2'-O-methyluridine with a 3'-phosphorothioate linkage
  modified_base 3: mod_base = OTHER; note = 2'-O-methyladenosine
  modified_base 4: mod_base = um
  modified_base 5: mod_base = OTHER; note = 2'-O-methyladenosine
  modified_base 6: mod_base = um
  modified_base 7: mod_base = gm
  modified_base 8: mod_base = cm
  modified_base 9: mod_base = OTHER; note = 2'-fluorocytidine
  modified_base 10: mod_base = OTHER; note = 2'-fluorocytidine
  modified_base 11: mod_base = OTHER; note = 2'-fluoroadenosine
  modified_base 12: mod_base = um
  modified_base 13: mod_base = cm
  modified_base 14: mod_base = cm
  modified_base 15: mod_base = cm
  modified_base 16: mod_base = um
  modified_base 17: mod_base = gm
  modified_base 18: mod_base = um
  modified_base 19: mod_base = OTHER; note = 2'-O-methyluridine with a 3'-phosphorothioate linkage
  modified_base 20: mod_base = OTHER; note = 2'-O-methylguanosine with a 3'-phosphorothioate linkage
  modified_base 21: mod_base = OTHER; note = 2'-O-methyladenosine
atatatgcccatccctgttga

SEQ ID NO: 1231 - RNA, 23 nt, synthetic construct
  source 1..23: mol_type = other RNA
  modified_base 1: mod_base = OTHER; note = 2'-O-methyluridine with a 3'-phosphorothioate linkage and a 5'-phosphate substitution
  modified_base 2: mod_base = OTHER; note = 2'-fluorocytidine with a 3'-phosphorothioate linkage
  modified_base 3: mod_base = OTHER; note = 2'-O-methyladenosine
  modified_base 4: mod_base = OTHER; note = 2'-O-methyladenosine
  modified_base 5: mod_base = OTHER; note = 2'-fluorocytidine
  modified_base 6: mod_base = OTHER; note = 2'-O-methyladenosine
  modified_base 7: mod_base = OTHER; note = 2'-fluoroguanosine
  modified_base 8: mod_base = gm
  modified_base 9: mod_base = gm
  modified_base 10: mod_base = OTHER; note = 2'-O-methyladenosine
  modified_base 11: mod_base = um
  modified_base 12: mod_base = gm
  modified_base 13: mod_base = gm
  modified_base 14: mod_base = OTHER; note = 2'-fluoroguanosine
  modified_base 15: mod_base = cm
  modified_base 16: mod_base = OTHER; note = 2'-fluoroadenosine
  modified_base 17: mod_base = um
  modified_base 18: mod_base = OTHER; note = 2'-O-methyladenosine
  modified_base 19: mod_base = um
  modified_base 20: mod_base = OTHER; note = 2'-O-methyladenosine
  modified_base 21: mod_base = OTHER; note = 2'-O-methyluridine with a 3'-phosphorothioate linkage
  modified_base 22: mod_base = OTHER; note = 2'-O-methylcytidine with a 3'-phosphorothioate linkage
  modified_base 23: mod_base = cm
tcaacagggatgggcatatatcc

SEQ ID NO: 1232 - RNA, 21 nt, synthetic construct
  source 1..21: mol_type = other RNA
  modified_base 1: mod_base = OTHER; note = 2'-O-methyluridine with a 3'-phosphorothioate linkage
  modified_base 2: mod_base = OTHER; note = 2'-O-methyladenosine with a 3'-phosphorothioate linkage
  modified_base 3: mod_base = um
  modified_base 4: mod_base = OTHER; note = 2'-O-methyladenosine
  modified_base 5: mod_base = um
  modified_base 6: mod_base = gm
  modified_base 7: mod_base = cm
  modified_base 8: mod_base = cm
  modified_base 9: mod_base = OTHER; note = 2'-fluorocytidine
  modified_base 10: mod_base = OTHER; note = 2'-fluoroadenosine
  modified_base 11: mod_base = OTHER; note = 2'-fluorouridine
  modified_base 12: mod_base = cm
  modified_base 13: mod_base = cm
  modified_base 14: mod_base = cm
  modified_base 15: mod_base = um
  modified_base 16: mod_base = gm
  modified_base 17: mod_base = um
  modified_base 18: mod_base = um
  modified_base 19: mod_base = OTHER; note = 2'-O-methylguanosine with a 3'-phosphorothioate linkage
  modified_base 20: mod_base = OTHER; note = 2'-O-methylguanosine with a 3'-phosphorothioate linkage
  modified_base 21: mod_base = OTHER; note = 2'-O-methyladenosine
tatatgcccatccctgttgga

SEQ ID NO: 1233 - RNA, 23 nt, synthetic construct
  source 1..23: mol_type = other RNA
  modified_base 1: mod_base = OTHER; note = 2'-O-methyluridine with a 3'-phosphorothioate linkage and a 5'-phosphate substitution
  modified_base 2: mod_base = OTHER; note = 2'-fluorocytidine with a 3'-phosphorothioate linkage
  modified_base 3: mod_base = cm
  modified_base 4: mod_base = OTHER; note = 2'-O-methyladenosine
  modified_base 5: mod_base = OTHER; note = 2'-fluoroadenosine
  modified_base 6: mod_base = cm
  modified_base 7: mod_base = OTHER; note = 2'-fluoroadenosine
  modified_base 8: mod_base = gm
  modified_base 9: mod_base = gm
  modified_base 10: mod_base = gm
  modified_base 11: mod_base = OTHER; note = 2'-O-methyladenosine
  modified_base 12: mod_base = um
  modified_base 13: mod_base = gm
  modified_base 14: mod_base = OTHER; note = 2'-fluoroguanosine
  modified_base 15: mod_base = gm
  modified_base 16: mod_base = OTHER; note = 2'-fluorocytidine
  modified_base 17: mod_base = OTHER; note = 2'-O-methyladenosine
  modified_base 18: mod_base = um
  modified_base 19: mod_base = OTHER; note = 2'-O-methyladenosine
  modified_base 20: mod_base = um
  modified_base 21: mod_base = OTHER; note = 2'-O-methyladenosine with a 3'-phosphorothioate linkage
  modified_base 22: mod_base = OTHER; note = 2'-O-methyluridine with a 3'-phosphorothioate linkage
  modified_base 23: mod_base = cm
tccaacagggatgggcatatatc

SEQ ID NO: 1234 - RNA, 21 nt, synthetic construct
  source 1..21: mol_type = other RNA
  modified_base 1: mod_base = OTHER; note = 2'-O-methyladenosine with a 3'-phosphorothioate linkage
  modified_base 2: mod_base = OTHER; note = 2'-O-methyluridine with a 3'-phosphorothioate linkage
  modified_base 3: mod_base = OTHER; note = 2'-O-methyladenosine
  modified_base 4: mod_base = um
  modified_base 5: mod_base = gm
  modified_base 6: mod_base = cm
  modified_base 7: mod_base = cm
  modified_base 8: mod_base = cm
  modified_base 9: mod_base = OTHER; note = 2'-fluoroadenosine
  modified_base 10: mod_base = OTHER; note = 2'-fluorouridine
  modified_base 11: mod_base = OTHER; note = 2'-fluorocytidine
  modified_base 12: mod_base = cm
  modified_base 13: mod_base = cm
  modified_base 14: mod_base = um
  modified_base 15: mod_base = gm
  modified_base 16: mod_base = um
  modified_base 17: mod_base = um
  modified_base 18: mod_base = gm
  modified_base 19: mod_base = OTHER; note = 2'-O-methylguanosine with a 3'-phosphorothioate linkage
  modified_base 20: mod_base = OTHER; note = 2'-O-methyladenosine with a 3'-phosphorothioate linkage
  modified_base 21: mod_base = OTHER; note = 2'-O-methyladenosine
atatgcccatccctgttggaa

SEQ ID NO: 1235 - RNA, 23 nt, synthetic construct
  source 1..23: mol_type = other RNA
  modified_base 1: mod_base = OTHER; note = 2'-O-methyluridine with a 3'-phosphorothioate linkage and a 5'-phosphate substitution
  modified_base 2: mod_base = OTHER; note = 2'-fluorouridine with a 3'-phosphorothioate linkage
  modified_base 3: mod_base = cm
  modified_base 4: mod_base = cm
  modified_base 5: mod_base = OTHER; note = 2'-fluoroadenosine
  modified_base 6: mod_base = OTHER; note = 2'-O-methyladenosine
  modified_base 7: mod_base = OTHER; note = 2'-fluorocytidine
  modified_base 8: mod_base = OTHER; note = 2'-O-methyladenosine
  modified_base 9: mod_base = gm
  modified_base 10: mod_base = gm
  modified_base 11: mod_base = gm
  modified_base 12: mod_base = OTHER; note = 2'-O-methyladenosine
  modified_base 13: mod_base = um
  modified_base 14: mod_base = OTHER; note = 2'-fluoroguanosine
  modified_base 15: mod_base = gm
  modified_base 16: mod_base = OTHER; note = 2'-fluoroguanosine
  modified_base 17: mod_base = cm
  modified_base 18: mod_base = OTHER; note = 2'-O-methyladenosine
  modified_base 19: mod_base = um
  modified_base 20: mod_base = OTHER; note = 2'-O-methyladenosine
  modified_base 21: mod_base = OTHER; note = 2'-O-methyluridine with a 3'-phosphorothioate linkage
  modified_base 22: mod_base = OTHER; note = 2'-O-methyladenosine with a 3'-phosphorothioate linkage
  modified_base 23: mod_base = um
ttccaacagggatgggcatatat

SEQ ID NO: 1236 - RNA, 21 nt, synthetic construct
  source 1..21: mol_type = other RNA
  modified_base 1: mod_base = OTHER; note = 2'-O-methyluridine with a 3'-phosphorothioate linkage
  modified_base 2: mod_base = OTHER; note = 2'-O-methyladenosine with a 3'-phosphorothioate linkage
  modified_base 3: mod_base = um
  modified_base 4: mod_base = gm
  modified_base 5: mod_base = cm
  modified_base 6: mod_base = cm
  modified_base 7: mod_base = cm
  modified_base 8: mod_base = OTHER; note = 2'-O-methyladenosine
  modified_base 9: mod_base = OTHER; note = 2'-fluorouridine
  modified_base 10: mod_base = OTHER; note = 2'-fluorocytidine
  modified_base 11: mod_base = OTHER; note = 2'-fluorocytidine
  modified_base 12: mod_base = cm
  modified_base 13: mod_base = um
  modified_base 14: mod_base = gm
  modified_base 15: mod_base = um
  modified_base 16: mod_base = um
  modified_base 17: mod_base = gm
  modified_base 18: mod_base = gm
  modified_base 19: mod_base = OTHER; note = 2'-O-methyladenosine with a 3'-phosphorothioate linkage
  modified_base 20: mod_base = OTHER; note = 2'-O-methylguanosine with a 3'-phosphorothioate linkage
  modified_base 21: mod_base = OTHER; note = 2'-O-methyladenosine
tatgcccatccctgttggaga

SEQ ID NO: 1237 - RNA, 23 nt, synthetic construct
  source 1..23: mol_type = other RNA
  modified_base 1: mod_base = OTHER; note = 2'-O-methyluridine with a 3'-phosphorothioate linkage and a 5'-phosphate substitution
  modified_base 2: mod_base = OTHER; note = 2'-fluorocytidine with a 3'-phosphorothioate linkage
  modified_base 3: mod_base = um
  modified_base 4: mod_base = cm
  modified_base 5: mod_base = OTHER; note = 2'-fluorocytidine
  modified_base 6: mod_base = OTHER; note = 2'-O-methyladenosine
  modified_base 7: mod_base = OTHER; note = 2'-fluoroadenosine
  modified_base 8: mod_base = cm
  modified_base 9: mod_base = OTHER; note = 2'-O-methyladenosine
  modified_base 10: mod_base = gm
  modified_base 11: mod_base = gm
  modified_base 12: mod_base = gm
  modified_base 13: mod_base = OTHER; note = 2'-O-methyladenosine
  modified_base 14: mod_base = OTHER; note = 2'-fluorouridine
  modified_base 15: mod_base = gm
  modified_base 16: mod_base = OTHER; note = 2'-fluoroguanosine
  modified_base 17: mod_base = gm
  modified_base 18: mod_base = cm
  modified_base 19: mod_base = OTHER; note = 2'-O-methyladenosine
  modified_base 20: mod_base = um
  modified_base 21: mod_base = OTHER; note = 2'-O-methyladenosine with a 3'-phosphorothioate linkage
  modified_base 22: mod_base = OTHER; note = 2'-O-methyluridine with a 3'-phosphorothioate linkage
  modified_base 23: mod_base = OTHER; note = 2'-O-methyladenosine
tctccaacagggatgggcatata

SEQ ID NO: 1238 - RNA, 21 nt, synthetic construct
  source 1..21: mol_type = other RNA
  modified_base 1: mod_base = OTHER; note = 2'-O-methylguanosine with a 3'-phosphorothioate linkage
  modified_base 2: mod_base = OTHER; note = 2'-O-methylguanosine with a 3'-phosphorothioate linkage
  modified_base 3: mod_base = um
  modified_base 4: mod_base = gm
  modified_base 5: mod_base = gm
  modified_base 6: mod_base = OTHER; note = 2'-O-methyladenosine
  modified_base 7: mod_base = gm
  modified_base 8: mod_base = gm
  modified_base 9: mod_base = OTHER; note = 2'-fluorouridine
  modified_base 10: mod_base = OTHER; note = 2'-fluoroguanosine
  modified_base 11: mod_base = OTHER; note = 2'-fluorocytidine
  modified_base 12: mod_base = cm
  modified_base 13: mod_base = OTHER; note = 2'-O-methyladenosine
  modified_base 14: mod_base = gm
  modified_base 15: mod_base = cm
  modified_base 16: mod_base = OTHER; note = 2'-O-methyladenosine
  modified_base 17: mod_base = gm
  modified_base 18: mod_base = cm
  modified_base 19: mod_base = OTHER; note = 2'-O-methylcytidine with a 3'-phosphorothioate linkage
  modified_base 20: mod_base = OTHER; note = 2'-O-methylguanosine with a 3'-phosphorothioate linkage
  modified_base 21: mod_base = OTHER; note = 2'-O-methyladenosine
ggtggaggtgccagcagccga

SEQ ID NO: 1239 - RNA, 23 nt, synthetic construct
  source 1..23: mol_type = other RNA
  modified_base 1: mod_base = OTHER; note = 2'-O-methyluridine with a 3'-phosphorothioate linkage and a 5'-phosphate substitution
  modified_base 2: mod_base = OTHER; note = 2'-fluorocytidine with a 3'-phosphorothioate linkage
  modified_base 3: mod_base = gm
  modified_base 4: mod_base = gm
  modified_base 5: mod_base = OTHER; note = 2'-fluorocytidine
  modified_base 6: mod_base = um
  modified_base 7: mod_base = OTHER; note = 2'-fluoroguanosine
  modified_base 8: mod_base = cm
  modified_base 9: mod_base = um
  modified_base 10: mod_base = gm
  modified_base 11: mod_base = gm
  modified_base 12: mod_base = cm
  modified_base 13: mod_base = OTHER; note = 2'-O-methyladenosine
  modified_base 14: mod_base = OTHER; note = 2'-fluorocytidine
  modified_base 15: mod_base = cm
  modified_base 16: mod_base = OTHER; note = 2'-fluorouridine
  modified_base 17: mod_base = cm
  modified_base 18: mod_base = cm
  modified_base 19: mod_base = OTHER; note = 2'-O-methyladenosine
  modified_base 20: mod_base = cm
  modified_base 21: mod_base = OTHER; note = 2'-O-methylcytidine with a 3'-phosphorothioate linkage
  modified_base 22: mod_base = OTHER; note = 2'-O-methyladenosine with a 3'-phosphorothioate linkage
  modified_base 23: mod_base = OTHER; note = 2'-O-methyladenosine
tcggctgctggcacctccaccaa

SEQ ID NO: 1240 - RNA, 21 nt, synthetic construct
  source 1..21: mol_type = other RNA
  modified_base 1: mod_base = OTHER; note = 2'-O-methylguanosine with a 3'-phosphorothioate linkage
  modified_base 2: mod_base = OTHER; note = 2'-O-methyluridine with a 3'-phosphorothioate linkage
  modified_base 3: mod_base = cm
  modified_base 4: mod_base = cm
  modified_base 5: mod_base = um
  modified_base 6: mod_base = um
  modified_base 7: mod_base = gm
  modified_base 8: mod_base = cm
  modified_base 9: mod_base = OTHER; note = 2'-fluoroadenosine
  modified_base 10: mod_base = OTHER; note = 2'-fluoroguanosine
  modified_base 11: mod_base = OTHER; note = 2'-fluoroadenosine
  modified_base 12: mod_base = um
  modified_base 13: mod_base = gm
  modified_base 14: mod_base = gm
  modified_base 15: mod_base = gm
  modified_base 16: mod_base = OTHER; note = 2'-O-methyladenosine
  modified_base 17: mod_base = um
  modified_base 18: mod_base = gm
  modified_base 19: mod_base = OTHER; note = 2'-O-methyladenosine with a 3'-phosphorothioate linkage
  modified_base 20: mod_base = OTHER; note = 2'-O-methylcytidine with a 3'-phosphorothioate linkage
  modified_base 21: mod_base = OTHER; note = 2'-O-methyladenosine
gtccttgcagatgggatgaca

SEQ ID NO: 1241 - RNA, 23 nt, synthetic construct
  source 1..23: mol_type = other RNA
  modified_base 1: mod_base = OTHER; note = 2'-O-methyluridine with a 3'-phosphorothioate linkage and a 5'-phosphate substitution
  modified_base 2: mod_base = OTHER; note = 2'-fluoroguanosine with a 3'-phosphorothioate linkage
  modified_base 3: mod_base = um
  modified_base 4: mod_base = cm
  modified_base 5: mod_base = OTHER; note = 2'-fluoroadenosine
  modified_base 6: mod_base = um
  modified_base 7: mod_base = OTHER; note = 2'-fluorocytidine
  modified_base 8: mod_base = cm
  modified_base 9: mod_base = cm
  modified_base 10: mod_base = OTHER; note = 2'-O-methyladenosine
  modified_base 11: mod_base = um
  modified_base 12: mod_base = cm
  modified_base 13: mod_base = um
  modified_base 14: mod_base = OTHER; note = 2'-fluoroguanosine
  modified_base 15: mod_base = cm
  modified_base 16: mod_base = OTHER; note = 2'-fluoroadenosine
  modified_base 17: mod_base = OTHER; note = 2'-O-methyladenosine
  modified_base 18: mod_base = gm
  modified_base 19: mod_base = gm
  modified_base 20: mod_base = OTHER; note = 2'-O-methyladenosine
  modified_base 21: mod_base = OTHER; note = 2'-O-methylcytidine with a 3'-phosphorothioate linkage
  modified_base 22: mod_base = OTHER; note = 2'-O-methyluridine with a 3'-phosphorothioate linkage
  modified_base 23: mod_base = cm
tgtcatcccatctgcaaggactc

SEQ ID NO: 1242 - RNA, 21 nt, synthetic construct
  source 1..21: mol_type = other RNA
  modified_base 1: mod_base = OTHER; note = 2'-O-methyluridine with a 3'-phosphorothioate linkage
  modified_base 2: mod_base = OTHER; note = 2'-O-methylcytidine with a 3'-phosphorothioate linkage
  modified_base 3: mod_base = cm
  modified_base 4: mod_base = um
  modified_base 5: mod_base = um
  modified_base 6: mod_base = gm
  modified_base 7: mod_base = cm
  modified_base 8: mod_base = OTHER; note = 2'-O-methyladenosine
  modified_base 9: mod_base = OTHER; note = 2'-fluoroguanosine
  modified_base 10: mod_base = OTHER; note = 2'-fluoroadenosine
  modified_base 11: mod_base = OTHER; note = 2'-fluorouridine
  modified_base 12: mod_base = gm
  modified_base 13: mod_base = gm
  modified_base 14: mod_base = gm
  modified_base 15: mod_base = OTHER; note = 2'-O-methyladenosine
  modified_base 16: mod_base = um
  modified_base 17: mod_base = gm
  modified_base 18: mod_base = OTHER; note = 2'-O-methyladenosine
  modified_base 19: mod_base = OTHER; note = 2'-O-methylcytidine with a 3'-phosphorothioate linkage
  modified_base 20: mod_base = OTHER; note = 2'-O-methyluridine with a 3'-phosphorothioate linkage
  modified_base 21: mod_base = OTHER; note = 2'-O-methyladenosine
tccttgcagatgggatgacta

SEQ ID NO: 1243 - RNA, 23 nt, synthetic construct
  source 1..23: mol_type = other RNA
  modified_base 1: mod_base = OTHER; note = 2'-O-methyluridine with a 3'-phosphorothioate linkage and a 5'-phosphate substitution
  modified_base 2: mod_base = OTHER; note = 2'-fluoroadenosine with a 3'-phosphorothioate linkage
  modified_base 3: mod_base = gm
  modified_base 4: mod_base = um
  modified_base 5: mod_base = OTHER; note = 2'-fluorocytidine
  modified_base 6: mod_base = OTHER; note = 2'-O-methyladenosine
  modified_base 7: mod_base = OTHER; note = 2'-fluorouridine
  modified_base 8: mod_base = cm
  modified_base 9: mod_base = cm
  modified_base 10: mod_base = cm
  modified_base 11: mod_base = OTHER; note = 2'-O-methyladenosine
  modified_base 12: mod_base = um
  modified_base 13: mod_base = cm
  modified_base 14: mod_base = OTHER; note = 2'-fluorouridine
  modified_base 15: mod_base = gm
  modified_base 16: mod_base = OTHER; note = 2'-fluorocytidine
  modified_base 17: mod_base = OTHER; note = 2'-O-methyladenosine
  modified_base 18: mod_base = OTHER; note = 2'-O-methyladenosine
  modified_base 19: mod_base = gm
  modified_base 20: mod_base = gm
  modified_base 21: mod_base = OTHER; note = 2'-O-methyladenosine with a 3'-phosphorothioate linkage
  modified_base 22: mod_base = OTHER; note = 2'-O-methylcytidine with a 3'-phosphorothioate linkage
  modified_base 23: mod_base = um
tagtcatcccatctgcaaggact

SEQ ID NO: 1244 - RNA, 21 nt, synthetic construct
  source 1..21: mol_type = other RNA
  modified_base 1: mod_base = OTHER; note = 2'-O-methylcytidine with a 3'-phosphorothioate linkage
  modified_base 2: mod_base = OTHER; note = 2'-O-methyluridine with a 3'-phosphorothioate linkage
  modified_base 3: mod_base = um
  modified_base 4: mod_base = gm
  modified_base 5: mod_base = cm
  modified_base 6: mod_base = OTHER; note = 2'-O-methyladenosine
  modified_base 7: mod_base = gm
  modified_base 8: mod_base = OTHER; note = 2'-O-methyladenosine
  modified_base 9: mod_base = OTHER; note = 2'-fluorouridine
  modified_base 10: mod_base = OTHER; note = 2'-fluoroguanosine
  modified_base 11: mod_base = OTHER; note = 2'-fluoroguanosine
  modified_base 12: mod_base = gm
  modified_base 13: mod_base = OTHER; note = 2'-O-methyladenosine
  modified_base 14: mod_base = um
  modified_base 15: mod_base = gm
  modified_base 16: mod_base = OTHER; note = 2'-O-methyladenosine
  modified_base 17: mod_base = cm
  modified_base 18: mod_base = um
  modified_base 19: mod_base = OTHER; note = 2'-O-methylcytidine with a 3'-phosphorothioate linkage
  modified_base 20: mod_base = OTHER; note = 2'-O-methylguanosine with a 3'-phosphorothioate linkage
  modified_base 21: mod_base = OTHER; note = 2'-O-methyladenosine
cttgcagatgggatgactcga

SEQ ID NO: 1245 - RNA, 23 nt, synthetic construct
  source 1..23: mol_type = other RNA
  modified_base 1: mod_base = OTHER; note = 2'-O-methyluridine with a 3'-phosphorothioate linkage and a 5'-phosphate substitution
  modified_base 2: mod_base = OTHER; note = 2'-fluorocytidine with a 3'-phosphorothioate linkage
  modified_base 3: mod_base = gm
  modified_base 4: mod_base = OTHER; note = 2'-O-methyladenosine
  modified_base 5: mod_base = OTHER; note = 2'-fluoroguanosine
  modified_base 6: mod_base = um
  modified_base 7: mod_base = OTHER; note = 2'-fluorocytidine
  modified_base 8: mod_base = OTHER; note = 2'-O-methyladenosine
  modified_base 9: mod_base = um
  modified_base 10: mod_base = cm
  modified_base 11: mod_base = cm
  modified_base 12: mod_base = cm
  modified_base 13: mod_base = OTHER; note = 2'-O-methyladenosine
  modified_base 14: mod_base = OTHER; note = 2'-fluorouridine
  modified_base 15: mod_base = cm
  modified_base 16: mod_base = OTHER; note = 2'-fluorouridine
  modified_base 17: mod_base = gm
  modified_base 18: mod_base = cm
  modified_base 19: mod_base = OTHER; note = 2'-O-methyladenosine
  modified_base 20: mod_base = OTHER; note = 2'-O-methyladenosine
  modified_base 21: mod_base = OTHER; note = 2'-O-methylguanosine with a 3'-phosphorothioate linkage
  modified_base 22: mod_base = OTHER; note = 2'-O-methylguanosine with a 3'-phosphorothioate linkage
  modified_base 23: mod_base = OTHER; note = 2'-O-methyladenosine
tcgagtcatcccatctgcaagga

SEQ ID NO: 1246 - RNA, 21 nt, synthetic construct
  source 1..21: mol_type = other RNA
  modified_base 1: mod_base = OTHER; note = 2'-O-methyluridine with a 3'-phosphorothioate linkage
  modified_base 2: mod_base = OTHER; note = 2'-O-methylguanosine with a 3'-phosphorothioate linkage
  modified_base 3: mod_base = cm
  modified_base 4: mod_base = gm
  modified_base 5: mod_base = um
  modified_base 6: mod_base = cm
  modified_base 7: mod_base = um
  modified_base 8: mod_base = um
  modified_base 9: mod_base = OTHER; note = 2'-fluorocytidine
  modified_base 10: mod_base = OTHER; note = 2'-fluorocytidine
  modified_base 11: mod_base = OTHER; note = 2'-fluoroadenosine
  modified_base 12: mod_base = cm
  modified_base 13: mod_base = gm
  modified_base 14: mod_base = um
  modified_base 15: mod_base = gm
  modified_base 16: mod_base = cm
  modified_base 17: mod_base = um
  modified_base 18: mod_base = um
  modified_base 19: mod_base = OTHER; note = 2'-O-methylguanosine with a 3'-phosphorothioate linkage
  modified_base 20: mod_base = OTHER; note = 2'-O-methyluridine with a 3'-phosphorothioate linkage
  modified_base 21: mod_base = OTHER; note = 2'-O-methyladenosine
tgcgtcttccacgtgcttgta

SEQ ID NO: 1247 - RNA, 23 nt, synthetic construct
  source 1..23: mol_type = other RNA
  modified_base 1: mod_base = OTHER; note = 2'-O-methyluridine with a 3'-phosphorothioate linkage and a 5'-phosphate substitution
  modified_base 2: mod_base = OTHER; note = 2'-fluoroadenosine with a 3'-phosphorothioate linkage
  modified_base 3: mod_base = cm
  modified_base 4: mod_base = OTHER; note = 2'-O-methyladenosine
  modified_base 5: mod_base = OTHER; note = 2'-fluoroadenosine
  modified_base 6: mod_base = gm
  modified_base 7: mod_base = OTHER; note = 2'-fluorocytidine
  modified_base 8: mod_base = OTHER; note = 2'-O-methyladenosine
  modified_base 9: mod_base = cm
  modified_base 10: mod_base = gm
  modified_base 11: mod_base = um
  modified_base 12: mod_base = gm
  modified_base 13: mod_base = gm
  modified_base 14: mod_base = OTHER; note = 2'-fluoroadenosine
  modified_base 15: mod_base = OTHER; note = 2'-O-methyladenosine
  modified_base 16: mod_base = OTHER; note = 2'-fluoroguanosine
  modified_base 17: mod_base = OTHER; note = 2'-O-methyladenosine
  modified_base 18: mod_base = cm
  modified_base 19: mod_base = gm
  modified_base 20: mod_base = cm
  modified_base 21: mod_base = OTHER; note = 2'-O-methyladenosine with a 3'-phosphorothioate linkage
  modified_base 22: mod_base = OTHER; note = 2'-O-methylcytidine with a 3'-phosphorothioate linkage
  modified_base 23: mod_base = OTHER; note = 2'-O-methyladenosine
tacaagcacgtggaagacgcaca

SEQ ID NO: 1248 - RNA, 21 nt, synthetic construct
  source 1..21: mol_type = other RNA
  modified_base 1: mod_base = OTHER; note = 2'-O-methylguanosine with a 3'-phosphorothioate linkage
  modified_base 2: mod_base = OTHER; note = 2'-O-methylcytidine with a 3'-phosphorothioate linkage
  modified_base 3: mod_base = gm
  modified_base 4: mod_base = um
  modified_base 5: mod_base = cm
  modified_base 6: mod_base = um
  modified_base 7: mod_base = um
  modified_base 8: mod_base = cm
  modified_base 9: mod_base = OTHER; note = 2'-fluorocytidine
  modified_base 10: mod_base = OTHER; note = 2'-fluoroadenosine
  modified_base 11: mod_base = OTHER; note = 2'-fluorocytidine
  modified_base 12: mod_base = gm
  modified_base 13: mod_base = um
  modified_base 14: mod_base = gm
  modified_base 15: mod_base = cm
  modified_base 16: mod_base = um
  modified_base 17: mod_base = um
  modified_base 18: mod_base = gm
  modified_base 19: mod_base = OTHER; note = 2'-O-methyluridine with a 3'-phosphorothioate linkage
  modified_base 20: mod_base = OTHER; note = 2'-O-methylguanosine with a 3'-phosphorothioate linkage
  modified_base 21: mod_base = OTHER; note = 2'-O-methyladenosine
gcgtcttccacgtgcttgtga

SEQ ID NO: 1249 - RNA, 23 nt, synthetic construct
  source 1..23: mol_type = other RNA
  modified_base 1: mod_base = OTHER; note = 2'-O-methyluridine with a 3'-phosphorothioate linkage and a 5'-phosphate substitution
  modified_base 2: mod_base = OTHER; note = 2'-fluorocytidine with a 3'-phosphorothioate linkage
  modified_base 3: mod_base = OTHER; note = 2'-O-methyladenosine
  modified_base 4: mod_base = cm
  modified_base 5: mod_base = OTHER; note = 2'-fluoroadenosine
  modified_base 6: mod_base = OTHER; note = 2'-O-methyladenosine
  modified_base 7: mod_base = OTHER; note = 2'-fluoroguanosine
  modified_base 8: mod_base = cm
  modified_base 9: mod_base = OTHER; note = 2'-O-methyladenosine
  modified_base 10: mod_base = cm
  modified_base 11: mod_base = gm
  modified_base 12: mod_base = um
  modified_base 13: mod_base = gm
  modified_base 14: mod_base = OTHER; note = 2'-fluoroguanosine
  modified_base 15: mod_base = OTHER; note = 2'-O-methyladenosine
  modified_base 16: mod_base = OTHER; note = 2'-fluoroadenosine
  modified_base 17: mod_base = gm
  modified_base 18: mod_base = OTHER; note = 2'-O-methyladenosine
  modified_base 19: mod_base = cm
  modified_base 20: mod_base = gm
  modified_base 21: mod_base = OTHER; note = 2'-O-methylcytidine with a 3'-phosphorothioate linkage
  modified_base 22: mod_base = OTHER; note = 2'-O-methyladenosine with a 3'-phosphorothioate linkage
  modified_base 23: mod_base = cm
tcacaagcacgtggaagacgcac

SEQ ID NO: 1250 - RNA, 21 nt, synthetic construct
  source 1..21: mol_type = other RNA
  modified_base 1: mod_base = OTHER; note = 2'-O-methylguanosine with a 3'-phosphorothioate linkage
  modified_base 2: mod_base = OTHER; note = 2'-O-methyluridine with a 3'-phosphorothioate linkage
  modified_base 3: mod_base = cm
  modified_base 4: mod_base = um
  modified_base 5: mod_base = um
  modified_base 6: mod_base = cm
  modified_base 7: mod_base = cm
  modified_base 8: mod_base = OTHER; note = 2'-O-methyladenosine
  modified_base 9: mod_base = OTHER; note = 2'-fluorocytidine
  modified_base 10: mod_base = OTHER; note = 2'-fluoroguanosine
  modified_base 11: mod_base = OTHER; note = 2'-fluorouridine
  modified_base 12: mod_base = gm
  modified_base 13: mod_base = cm
  modified_base 14: mod_base = um
  modified_base 15: mod_base = um
  modified_base 16: mod_base = gm
  modified_base 17: mod_base = um
  modified_base 18: mod_base = gm
  modified_base 19: mod_base = OTHER; note = 2'-O-methyladenosine with a 3'-phosphorothioate linkage
  modified_base 20: mod_base = OTHER; note = 2'-O-methylcytidine with a 3'-phosphorothioate linkage
  modified_base 21: mod_base = OTHER; note = 2'-O-methyladenosine
gtcttccacgtgcttgtgaca

SEQ ID NO: 1251 - RNA, 23 nt, synthetic construct
  source 1..23: mol_type = other RNA
  modified_base 1: mod_base = OTHER; note = 2'-O-methyluridine with a 3'-phosphorothioate linkage and a 5'-phosphate substitution
  modified_base 2: mod_base = OTHER; note = 2'-fluoroguanosine with a 3'-phosphorothioate linkage
  modified_base 3: mod_base = um
  modified_base 4: mod_base = cm
  modified_base 5: mod_base = OTHER; note = 2'-fluoroadenosine
  modified_base 6: mod_base = cm
  modified_base 7: mod_base = OTHER; note = 2'-fluoroadenosine
  modified_base 8: mod_base = OTHER; note = 2'-O-methyladenosine
  modified_base 9: mod_base = gm
  modified_base 10: mod_base = cm
  modified_base 11: mod_base = OTHER; note = 2'-O-methyladenosine
  modified_base 12: mod_base = cm
  modified_base 13: mod_base = gm
  modified_base 14: mod_base = OTHER; note = 2'-fluorouridine
  modified_base 15: mod_base = gm
  modified_base 16: mod_base = OTHER; note = 2'-fluoroguanosine
  modified_base 17: mod_base = OTHER; note = 2'-O-methyladenosine
  modified_base 18: mod_base = OTHER; note = 2'-O-methyladenosine
  modified_base 19: mod_base = gm
  modified_base 20: mod_base = OTHER; note = 2'-O-methyladenosine
  modified_base 21: mod_base = OTHER; note = 2'-O-methylcytidine with a 3'-phosphorothioate linkage
  modified_base 22: mod_base = OTHER; note = 2'-O-methylguanosine with a 3'-phosphorothioate linkage
  modified_base 23: mod_base = cm
tgtcacaagcacgtggaagacgc

SEQ ID NO: 1252 - RNA, 21 nt, synthetic construct
  source 1..21: mol_type = other RNA
  modified_base 1: mod_base = OTHER; note = 2'-O-methylcytidine with a 3'-phosphorothioate linkage
  modified_base 2: mod_base = OTHER; note = 2'-O-methyladenosine with a 3'-phosphorothioate linkage
  modified_base 3: mod_base = cm
  modified_base 4: mod_base = gm
  modified_base 5: mod_base = um
  modified_base 6: mod_base = gm
  modified_base 7: mod_base = cm
  modified_base 8: mod_base = um
  modified_base 9: mod_base = OTHER; note = 2'-fluorouridine
  modified_base 10: mod_base = OTHER; note = 2'-fluoroguanosine
  modified_base 11: mod_base = OTHER; note = 2'-fluorouridine
  modified_base 12: mod_base = gm
  modified_base 13: mod_base = OTHER; note = 2'-O-methyladenosine
  modified_base 14: mod_base = cm
  modified_base 15: mod_base = um
  modified_base 16: mod_base = cm
  modified_base 17: mod_base = um
  modified_base 18: mod_base = gm
  modified_base 19: mod_base = OTHER; note = 2'-O-methylcytidine with a 3'-phosphorothioate linkage
  modified_base 20: mod_base = OTHER; note = 2'-O-methyladenosine with a 3'-phosphorothioate linkage
  modified_base 21: mod_base = OTHER; note = 2'-O-methyladenosine
cacgtgcttgtgactctgcaa

SEQ ID NO: 1253 - RNA, 23 nt, synthetic construct
  source 1..23: mol_type = other RNA
  modified_base 1: mod_base = OTHER; note = 2'-O-methyluridine with a 3'-phosphorothioate linkage and a 5'-phosphate substitution
  modified_base 2: mod_base = OTHER; note = 2'-fluorouridine with a 3'-phosphorothioate linkage
  modified_base 3: mod_base = gm
  modified_base 4: mod_base = cm
  modified_base 5: mod_base = OTHER; note = 2'-fluoroadenosine
  modified_base 6: mod_base = gm
  modified_base 7: mod_base = OTHER; note = 2'-fluoroadenosine
  modified_base 8: mod_base = gm
  modified_base 9: mod_base = um
  modified_base 10: mod_base = cm
  modified_base 11: mod_base = OTHER; note = 2'-O-methyladenosine
  modified_base 12: mod_base = cm
  modified_base 13: mod_base = OTHER; note = 2'-O-methyladenosine
  modified_base 14: mod_base = OTHER; note = 2'-fluoroadenosine
  modified_base 15: mod_base = gm
  modified_base 16: mod_base = OTHER; note = 2'-fluorocytidine
  modified_base 17: mod_base = OTHER; note = 2'-O-methyladenosine
  modified_base 18: mod_base = cm
  modified_base 19: mod_base = gm
  modified_base 20: mod_base = um
  modified_base 21: mod_base = OTHER; note = 2'-O-methylguanosine with a 3'-phosphorothioate linkage
  modified_base 22: mod_base = OTHER; note = 2'-O-methylguanosine with a 3'-phosphorothioate linkage
  modified_base 23: mod_base = OTHER; note = 2'-O-methyladenosine
ttgcagagtcacaagcacgtgga

SEQ ID NO: 1254 - RNA, 21 nt, synthetic construct
  source 1..21: mol_type = other RNA
  modified_base 1: mod_base = OTHER; note = 2'-O-methyluridine with a 3'-phosphorothioate linkage
  modified_base 2: mod_base = OTHER; note = 2'-O-methylguanosine with a 3'-phosphorothioate linkage
  modified_base 3: mod_base = cm
  modified_base 4: mod_base = um
  modified_base 5: mod_base = um
  modified_base 6: mod_base = gm
  modified_base 7: mod_base = um
  modified_base 8: mod_base = gm
  modified_base 9: mod_base = OTHER; note = 2'-fluoroadenosine
  modified_base 10: mod_base = OTHER; note = 2'-fluorocytidine
  modified_base 11: mod_base = OTHER; note = 2'-fluorouridine
  modified_base 12: mod_base = cm
  modified_base 13: mod_base = um
  modified_base 14: mod_base = gm
  modified_base 15: mod_base = cm
  modified_base 16: mod_base = OTHER; note = 2'-O-methyladenosine
  modified_base 17: mod_base = gm
  modified_base 18: mod_base = OTHER; note = 2'-O-methyladenosine
  modified_base 19: mod_base = OTHER; note = 2'-O-methyladenosine with a 3'-phosphorothioate linkage
  modified_base 20: mod_base = OTHER; note = 2'-O-methylguanosine with a 3'-phosphorothioate linkage
  modified_base 21: mod_base = OTHER; note = 2'-O-methyladenosine
tgcttgtgactctgcagaaga

SEQ ID NO: 1255 - RNA, 23 nt, synthetic construct
  source 1..23: mol_type = other RNA
  modified_base 1: mod_base = OTHER; note = 2'-O-methyluridine with a 3'-phosphorothioate linkage and a 5'-phosphate substitution
  modified_base 2: mod_base = OTHER; note = 2'-fluorocytidine with a 3'-phosphorothioate linkage
  modified_base 3: mod_base = um
  modified_base 4: mod_base = um
  modified_base 5: mod_base = OTHER; note = 2'-fluorocytidine
  modified_base 6: mod_base = um
  modified_base 7: mod_base = OTHER; note = 2'-fluoroguanosine
  modified_base 8: mod_base = cm
  modified_base 9: mod_base = OTHER; note = 2'-O-methyladenosine
  modified_base 10: mod_base = gm
  modified_base 11: mod_base = OTHER; note = 2'-O-methyladenosine
  modified_base 12: mod_base = gm
  modified_base 13: mod_base = um
  modified_base 14: mod_base = OTHER; note = 2'-fluorocytidine
  modified_base 15: mod_base = OTHER; note = 2'-O-methyladenosine
  modified_base 16: mod_base = OTHER; note = 2'-fluorocytidine
  modified_base 17: mod_base = OTHER; note = 2'-O-methyladenosine
  modified_base 18: mod_base = OTHER; note = 2'-O-methyladenosine
  modified_base 19: mod_base = gm
  modified_base 20: mod_base = cm
  modified_base 21: mod_base = OTHER; note = 2'-O-methyladenosine with a 3'-phosphorothioate linkage
  modified_base 22: mod_base = OTHER; note = 2'-O-methylcytidine with a 3'-phosphorothioate linkage
  modified_base 23: mod_base = gm
tcttctgcagagtcacaagcacg

SEQ ID NO: 1256 - RNA, 21 nt, synthetic construct
  source 1..21: mol_type = other RNA
  modified_base 1: mod_base = OTHER; note = 2'-O-methyluridine with a 3'-phosphorothioate linkage
  modified_base 2: mod_base = OTHER; note = 2'-O-methyluridine with a 3'-phosphorothioate linkage
  modified_base 3: mod_base = um
  modified_base 4: mod_base = OTHER; note = 2'-O-methyladenosine
  modified_base 5: mod_base = um
  modified_base 6: mod_base = OTHER; note = 2'-O-methyladenosine
  modified_base 7: mod_base = um
  modified_base 8: mod_base = cm
  modified_base 9: mod_base = OTHER; note = 2'-fluorocytidine
  modified_base 10: mod_base = OTHER; note = 2'-fluoroguanosine
  modified_base 11: mod_base = OTHER; note = 2'-fluorouridine
  modified_base 12: mod_base = um
  modified_base 13: mod_base = um
  modified_base 14: mod_base = cm
  modified_base 15: mod_base = cm
  modified_base 16: mod_base = OTHER; note = 2'-O-methyladenosine
  modified_base 17: mod_base = gm
  modified_base 18: mod_base = um
  modified_base 19: mod_base = OTHER; note = 2'-O-methylcytidine with a 3'-phosphorothioate linkage
  modified_base 20: mod_base = OTHER; note = 2'-O-methylcytidine with a 3'-phosphorothioate linkage
  modified_base 21: mod_base = OTHER; note = 2'-O-methyladenosine
tttatatccgtttccagtcca

SEQ ID NO: 1257 - RNA, 23 nt, synthetic construct
  source 1..23: mol_type = other RNA
  modified_base 1: mod_base = OTHER; note = 2'-O-methyluridine with a 3'-phosphorothioate linkage and a 5'-phosphate substitution
  modified_base 2: mod_base = OTHER; note = 2'-fluoroguanosine with a 3'-phosphorothioate linkage
  modified_base 3: mod_base = gm
  modified_base 4: mod_base = OTHER; note = 2'-O-methyladenosine
  modified_base 5: mod_base = OTHER; note = 2'-fluorocytidine
  modified_base 6: mod_base = um
  modified_base 7: mod_base = OTHER; note = 2'-fluoroguanosine
  modified_base 8: mod_base = gm
  modified_base 9: mod_base = OTHER; note = 2'-O-methyladenosine
  modified_base 10: mod_base = OTHER; note = 2'-O-methyladenosine
  modified_base 11: mod_base = OTHER; note = 2'-O-methyladenosine
  modified_base 12: mod_base = cm
  modified_base 13: mod_base = gm
  modified_base 14: mod_base = OTHER; note = 2'-fluoroguanosine
  modified_base 15: mod_base = OTHER; note = 2'-O-methyladenosine
  modified_base 16: mod_base = OTHER; note = 2'-fluorouridine
  modified_base 17: mod_base = OTHER; note = 2'-O-methyladenosine
  modified_base 18: mod_base = um
  modified_base 19: mod_base = OTHER; note = 2'-O-methyladenosine
  modified_base 20: mod_base = OTHER; note = 2'-O-methyladenosine
  modified_base 21: mod_base = OTHER; note = 2'-O-methyladenosine with a 3'-phosphorothioate linkage
  modified_base 22: mod_base = OTHER; note = 2'-O-methylguanosine with a 3'-phosphorothioate linkage
  modified_base 23: mod_base = gm
tggactggaaacggatataaagg

SEQ ID NO: 1258 - RNA, 21 nt, synthetic construct
  source 1..21: mol_type = other RNA
  modified_base 1: mod_base = OTHER; note = 2'-O-methyluridine with a 3'-phosphorothioate linkage
  modified_base 2: mod_base = OTHER; note = 2'-O-methyluridine with a 3'-phosphorothioate linkage
  modified_base 3: mod_base = OTHER; note = 2'-O-methyladenosine
  modified_base 4: mod_base = um
  modified_base 5: mod_base = OTHER; note = 2'-O-methyladenosine
  modified_base 6: mod_base = um
  modified_base 7: mod_base = cm
  modified_base 8: mod_base = cm
  modified_base 9: mod_base = OTHER; note = 2'-fluoroguanosine
  modified_base 10: mod_base = OTHER; note = 2'-fluorouridine
  modified_base 11: mod_base = OTHER; note = 2'-fluorouridine
  modified_base 12: mod_base = um
  modified_base 13: mod_base = cm
  modified_base 14: mod_base = cm
  modified_base 15: mod_base = OTHER; note = 2'-O-methyladenosine
  modified_base 16: mod_base = gm
  modified_base 17: mod_base = um
  modified_base 18: mod_base = cm
  modified_base 19: mod_base = OTHER; note = 2'-O-methylcytidine with a 3'-phosphorothioate linkage
  modified_base 20: mod_base = OTHER; note = 2'-O-methyladenosine with a 3'-phosphorothioate linkage
  modified_base 21: mod_base = OTHER; note = 2'-O-methyladenosine
ttatatccgtttccagtccaa

SEQ ID NO: 1259 - RNA, 23 nt, synthetic construct
  source 1..23: mol_type = other RNA
  modified_base 1: mod_base = OTHER; note = 2'-O-methyluridine with a 3'-phosphorothioate linkage and a 5'-phosphate substitution
  modified_base 2: mod_base = OTHER; note = 2'-fluorouridine with a 3'-phosphorothioate linkage
  modified_base 3: mod_base = gm
  modified_base 4: mod_base = gm
  modified_base 5: mod_base = OTHER; note = 2'-fluoroadenosine
  modified_base 6: mod_base = cm
  modified_base 7: mod_base = OTHER; note = 2'-fluorouridine
  modified_base 8: mod_base = gm
  modified_base 9: mod_base = gm
  modified_base 10: mod_base = OTHER; note = 2'-O-methyladenosine
  modified_base 11: mod_base = OTHER; note = 2'-O-methyladenosine
  modified_base 12: mod_base = OTHER; note = 2'-O-methyladenosine
  modified_base 13: mod_base = cm
  modified_base 14: mod_base = OTHER; note = 2'-fluoroguanosine
  modified_base 15: mod_base = gm
  modified_base 16: mod_base = OTHER; note = 2'-fluoroadenosine
  modified_base 17: mod_base = um
  modified_base 18: mod_base = OTHER; note = 2'-O-methyladenosine
  modified_base 19: mod_base = um
  modified_base 20: mod_base = OTHER; note = 2'-O-methyladenosine
  modified_base 21: mod_base = OTHER; note = 2'-O-methyladenosine with a 3'-phosphorothioate linkage
  modified_base 22: mod_base = OTHER; note = 2'-O-methyladenosine with a 3'-phosphorothioate linkage
  modified_base 23: mod_base = gm
ttggactggaaacggatataaag

SEQ ID NO: 1260 - RNA, 21 nt, synthetic construct
  source 1..21: mol_type = other RNA
  modified_base 1: mod_base = OTHER; note = 2'-O-methyladenosine with a 3'-phosphorothioate linkage
  modified_base 2: mod_base = OTHER; note = 2'-O-methyluridine with a 3'-phosphorothioate linkage
  modified_base 3: mod_base = OTHER; note = 2'-O-methyladenosine
  modified_base 4: mod_base = um
  modified_base 5: mod_base = cm
  modified_base 6: mod_base = cm
  modified_base 7: mod_base = gm
  modified_base 8: mod_base = um
  modified_base 9: mod_base = OTHER; note = 2'-fluorouridine
  modified_base 10: mod_base = OTHER; note = 2'-fluorouridine
  modified_base 11: mod_base = OTHER; note = 2'-fluorocytidine
  modified_base 12: mod_base = cm
  modified_base 13: mod_base = OTHER; note = 2'-O-methyladenosine
  modified_base 14: mod_base = gm
  modified_base 15: mod_base = um
  modified_base 16: mod_base = cm
  modified_base 17: mod_base = cm
  modified_base 18: mod_base = OTHER; note = 2'-O-methyladenosine
  modified_base 19: mod_base = OTHER; note = 2'-O-methylguanosine with a 3'-phosphorothioate linkage
  modified_base 20: mod_base = OTHER; note = 2'-O-methylguanosine with a 3'-phosphorothioate linkage
  modified_base 21: mod_base = OTHER; note = 2'-O-methyladenosine
atatccgtttccagtccagga

SEQ ID NO: 1261 - RNA, 23 nt, synthetic construct
  source 1..23: mol_type = other RNA
  modified_base 1: mod_base = OTHER; note = 2'-O-methyluridine with a 3'-phosphorothioate linkage and a 5'-phosphate substitution
  modified_base 2: mod_base = OTHER; note = 2'-fluorocytidine with a 3'-phosphorothioate linkage
  modified_base 3: mod_base = cm
  modified_base 4: mod_base = um
  modified_base 5: mod_base = OTHER; note = 2'-fluoroguanosine
  modified_base 6: mod_base = gm
  modified_base 7: mod_base = OTHER; note = 2'-fluoroadenosine
  modified_base 8: mod_base = cm
  modified_base 9: mod_base = um
  modified_base 10: mod_base = gm
  modified_base 11: mod_base = gm
  modified_base 12: mod_base = OTHER; note = 2'-O-methyladenosine
  modified_base 13: mod_base = OTHER; note = 2'-O-methyladenosine
  modified_base 14: mod_base = OTHER; note = 2'-fluoroadenosine
  modified_base 15: mod_base = cm
  modified_base 16: mod_base = OTHER; note = 2'-fluoroguanosine
  modified_base 17: mod_base = gm
  modified_base 18: mod_base = OTHER; note = 2'-O-methyladenosine
  modified_base 19: mod_base = um
  modified_base 20: mod_base = OTHER; note = 2'-O-methyladenosine
  modified_base 21: mod_base = OTHER; note = 2'-O-methyluridine with a 3'-phosphorothioate linkage
  modified_base 22: mod_base = OTHER; note = 2'-O-methyladenosine with a 3'-phosphorothioate linkage
  modified_base 23: mod_base = OTHER; note = 2'-O-methyladenosine
tcctggactggaaacggatataa

SEQ ID NO: 1262 - RNA, 21 nt, synthetic construct
  source 1..21: mol_type = other RNA
  modified_base 1: mod_base = OTHER; note = 2'-O-methylcytidine with a 3'-phosphorothioate linkage
  modified_base 2: mod_base = OTHER; note = 2'-O-methyluridine with a 3'-phosphorothioate linkage
  modified_base 3: mod_base = gm
  modified_base 4: mod_base = cm
  modified_base 5: mod_base = cm
  modified_base 6: mod_base = OTHER; note = 2'-O-methyladenosine
  modified_base 7: mod_base = um
  modified_base 8: mod_base = gm
  modified_base 9: mod_base = OTHER; note = 2'-fluoroguanosine
  modified_base 10: mod_base = OTHER; note = 2'-fluorocytidine
  modified_base 11: mod_base = OTHER; note = 2'-fluorouridine
  modified_base 12: mod_base = gm
  modified_base 13: mod_base = gm
  modified_base 14: mod_base = gm
  modified_base 15: mod_base = OTHER; note = 2'-O-methyladenosine
  modified_base 16: mod_base = gm
  modified_base 17: mod_base = cm
  modified_base 18: mod_base = OTHER; note = 2'-O-methyladenosine
  modified_base 19: mod_base = OTHER; note = 2'-O-methyluridine with a 3'-phosphorothioate linkage
  modified_base 20: mod_base = OTHER; note = 2'-O-methyladenosine with a 3'-phosphorothioate linkage
  modified_base 21: mod_base = OTHER; note = 2'-O-methyladenosine
ctgccatggctgggagcataa

SEQ ID NO: 1263 - RNA, 23 nt, synthetic construct
  source 1..23: mol_type = other RNA
  modified_base 1: mod_base = OTHER; note = 2'-O-methyluridine with a 3'-phosphorothioate linkage and a 5'-phosphate substitution
  modified_base 2: mod_base = OTHER; note = 2'-fluorouridine with a 3'-phosphorothioate linkage
  modified_base 3: mod_base = OTHER; note = 2'-O-methyladenosine
  modified_base 4: mod_base = um
  modified_base 5: mod_base = OTHER; note = 2'-fluoroguanosine
  modified_base 6: mod_base = cm
  modified_base 7: mod_base = OTHER; note = 2'-fluorouridine
  modified_base 8: mod_base = cm
  modified_base 9: mod_base = cm
  modified_base 10: mod_base = cm
  modified_base 11: mod_base = OTHER; note = 2'-O-methyladenosine
  modified_base 12: mod_base = gm
  modified_base 13: mod_base = cm
  modified_base 14: mod_base = OTHER; note = 2'-fluorocytidine
  modified_base 15: mod_base = OTHER; note = 2'-O-methyladenosine
  modified_base 16: mod_base = OTHER; note = 2'-fluorouridine
  modified_base 17: mod_base = gm
  modified_base 18: mod_base = gm
  modified_base 19: mod_base = cm
  modified_base 20: mod_base = OTHER; note = 2'-O-methyladenosine
  modified_base 21: mod_base = OTHER; note = 2'-O-methylguanosine with a 3'-phosphorothioate linkage
  modified_base 22: mod_base = OTHER; note = 2'-O-methyladenosine with a 3'-phosphorothioate linkage
  modified_base 23: mod_base = gm
ttatgctcccagccatggcagag

SEQ ID NO: 1264 - RNA, 21 nt, synthetic construct
  source 1..21: mol_type = other RNA
  modified_base 1: mod_base = OTHER; note = 2'-O-methyluridine with a 3'-phosphorothioate linkage
  modified_base 2: mod_base = OTHER; note = 2'-O-methylguanosine with a 3'-phosphorothioate linkage
  modified_base 3: mod_base = cm
  modified_base 4: mod_base = cm
  modified_base 5: mod_base = OTHER; note = 2'-O-methyladenosine
  modified_base 6: mod_base = um
  modified_base 7: mod_base = gm
  modified_base 8: mod_base = gm
  modified_base 9: mod_base = OTHER; note = 2'-fluorocytidine
  modified_base 10: mod_base = OTHER; note = 2'-fluorouridine
  modified_base 11: mod_base = OTHER; note = 2'-fluoroguanosine
  modified_base 12: mod_base = gm
  modified_base 13: mod_base = gm
  modified_base 14: mod_base = OTHER; note = 2'-O-methyladenosine
  modified_base 15: mod_base = gm
  modified_base 16: mod_base = cm
  modified_base 17: mod_base = OTHER; note = 2'-O-methyladenosine
  modified_base 18: mod_base = um
  modified_base 19: mod_base = OTHER; note = 2'-O-methyladenosine with a 3'-phosphorothioate linkage
  modified_base 20: mod_base = OTHER; note = 2'-O-methylguanosine with a 3'-phosphorothioate linkage
  modified_base 21: mod_base = OTHER; note = 2'-O-methyladenosine
tgccatggctgggagcataga

SEQ ID NO: 1265 - RNA, 23 nt, synthetic construct
  source 1..23: mol_type = other RNA
  modified_base 1: mod_base = OTHER; note = 2'-O-methyluridine with a 3'-phosphorothioate linkage and a 5'-phosphate substitution
  modified_base 2: mod_base = OTHER; note = 2'-fluorocytidine with a 3'-phosphorothioate linkage
  modified_base 3: mod_base = um
  modified_base 4: mod_base = OTHER; note = 2'-O-methyladenosine
  modified_base 5: mod_base = OTHER; note = 2'-fluorouridine
  modified_base 6: mod_base = gm
  modified_base 7: mod_base = OTHER; note = 2'-fluorocytidine
  modified_base 8: mod_base = um
  modified_base 9: mod_base = cm
  modified_base 10: mod_base = cm
  modified_base 11: mod_base = cm
  modified_base 12: mod_base = OTHER; note = 2'-O-methyladenosine
  modified_base 13: mod_base = gm
  modified_base 14: mod_base = OTHER; note = 2'-fluorocytidine
  modified_base 15: mod_base = cm
  modified_base 16: mod_base = OTHER; note = 2'-fluoroadenosine
  modified_base 17: mod_base = um
  modified_base 18: mod_base = gm
  modified_base 19: mod_base = gm
  modified_base 20: mod_base = cm
  modified_base 21: mod_base = OTHER; note = 2'-O-methyladenosine with a 3'-phosphorothioate linkage
  modified_base 22: mod_base = OTHER; note = 2'-O-methylguanosine with a 3'-phosphorothioate linkage
  modified_base 23: mod_base = OTHER; note = 2'-O-methyladenosine
tctatgctcccagccatggcaga

SEQ ID NO: 1266 - RNA, 21 nt, synthetic construct
  source 1..21: mol_type = other RNA
  modified_base 1: mod_base = OTHER; note = 2'-O-methylguanosine with a 3'-phosphorothioate linkage
  modified_base 2: mod_base = OTHER; note = 2'-O-methylcytidine with a 3'-phosphorothioate linkage
  modified_base 3: mod_base = cm
  modified_base 4: mod_base = OTHER; note = 2'-O-methyladenosine
  modified_base 5: mod_base = um
  modified_base 6: mod_base = gm
  modified_base 7: mod_base = gm
  modified_base 8: mod_base = cm
  modified_base 9: mod_base = OTHER; note = 2'-fluorouridine
  modified_base 10: mod_base = OTHER; note = 2'-fluoroguanosine
  modified_base 11: mod_base = OTHER; note = 2'-fluoroguanosine
  modified_base 12: mod_base = gm
  modified_base 13: mod_base = OTHER; note = 2'-O-methyladenosine
  modified_base 14: mod_base = gm
  modified_base 15: mod_base = cm
  modified_base 16: mod_base = OTHER; note = 2'-O-methyladenosine
  modified_base 17: mod_base = um
  modified_base 18: mod_base = OTHER; note = 2'-O-methyladenosine
  modified_base 19: mod_base = OTHER; note = 2'-O-methylguanosine with a 3'-phosphorothioate linkage
  modified_base 20: mod_base = OTHER; note = 2'-O-methylguanosine with a 3'-phosphorothioate linkage
  modified_base 21: mod_base = OTHER; note = 2'-O-methyladenosine
gccatggctgggagcatagga

SEQ ID NO: 1267 - RNA, 23 nt, synthetic construct
  source 1..23: mol_type = other RNA
  modified_base 1: mod_base = OTHER; note = 2'-O-methyluridine with a 3'-phosphorothioate linkage and a 5'-phosphate substitution
  modified_base 2: mod_base = OTHER; note = 2'-fluorocytidine with a 3'-phosphorothioate linkage
  modified_base 3: mod_base = cm
  modified_base 4: mod_base = um
  modified_base 5: mod_base = OTHER; note = 2'-fluoroadenosine
  modified_base 6: mod_base = um
  modified_base 7: mod_base = OTHER; note = 2'-fluoroguanosine
  modified_base 8: mod_base = cm
  modified_base 9: mod_base = um
  modified_base 10: mod_base = cm
  modified_base 11: mod_base = cm
  modified_base 12: mod_base = cm
  modified_base 13: mod_base = OTHER; note = 2'-O-methyladenosine
  modified_base 14: mod_base = OTHER; note = 2'-fluoroguanosine
  modified_base 15: mod_base = cm
  modified_base 16: mod_base = OTHER; note = 2'-fluorocytidine
  modified_base 17: mod_base = OTHER; note = 2'-O-methyladenosine
  modified_base 18: mod_base = um
  modified_base 19: mod_base = gm
  modified_base 20: mod_base = gm
  modified_base 21: mod_base = OTHER; note = 2'-O-methylcytidine with a 3'-phosphorothioate linkage
  modified_base 22: mod_base = OTHER; note = 2'-O-methyladenosine with a 3'-phosphorothioate linkage
  modified_base 23: mod_base = gm
tcctatgctcccagccatggcag

SEQ ID NO: 1268 - RNA, 21 nt, synthetic construct
  source 1..21: mol_type = other RNA
  modified_base 1: mod_base = OTHER; note = 2'-O-methyladenosine with a 3'-phosphorothioate linkage
  modified_base 2: mod_base = OTHER; note = 2'-O-methylcytidine with a 3'-phosphorothioate linkage
  modified_base 3: mod_base = OTHER; note = 2'-O-methyladenosine
  modified_base 4: mod_base = gm
  modified_base 5: mod_base = gm
  modified_base 6: mod_base = OTHER; note = 2'-O-methyladenosine
  modified_base 7: mod_base = um
  modified_base 8: mod_base = gm
  modified_base 9: mod_base = OTHER; note = 2'-fluorocytidine
  modified_base 10: mod_base = OTHER; note = 2'-fluoroadenosine
  modified_base 11: mod_base = OTHER; note = 2'-fluoroguanosine
  modified_base 12: mod_base = cm
  modified_base 13: mod_base = OTHER; note = 2'-O-methyladenosine
  modified_base 14: mod_base = cm
  modified_base 15: mod_base = OTHER; note = 2'-O-methyladenosine
  modified_base 16: mod_base = gm
  modified_base 17: mod_base = OTHER; note = 2'-O-methyladenosine
  modified_base 18: mod_base = OTHER; note = 2'-O-methyladenosine
  modified_base 19: mod_base = OTHER; note = 2'-O-methyluridine with a 3'-phosphorothioate linkage
  modified_base 20: mod_base = OTHER; note = 2'-O-methylguanosine with a 3'-phosphorothioate linkage
  modified_base 21: mod_base = OTHER; note = 2'-O-methyladenosine
acaggatgcagcacagaatga

SEQ ID NO: 1269 - RNA, 23 nt, synthetic construct
  source 1..23: mol_type = other RNA
  modified_base 1: mod_base = OTHER; note = 2'-O-methyluridine with a 3'-phosphorothioate linkage and a 5'-phosphate substitution
  modified_base 2: mod_base = OTHER; note = 2'-fluorocytidine with a 3'-phosphorothioate linkage
  modified_base 3: mod_base = OTHER; note = 2'-O-methyladenosine
  modified_base 4: mod_base = um
  modified_base 5: mod_base = OTHER; note = 2'-fluorouridine
  modified_base 6: mod_base = cm
  modified_base 7: mod_base = OTHER; note = 2'-fluorouridine
  modified_base 8: mod_base = gm
  modified_base 9: mod_base = um
  modified_base 10: mod_base = gm
  modified_base 11: mod_base = cm
  modified_base 12: mod_base = um
  modified_base 13: mod_base = gm
  modified_base 14: mod_base = OTHER; note = 2'-fluorocytidine
  modified_base 15: mod_base = OTHER; note = 2'-O-methyladenosine
  modified_base 16: mod_base = OTHER; note = 2'-fluorouridine
  modified_base 17: mod_base = cm
  modified_base 18: mod_base = cm
  modified_base 19: mod_base = um
  modified_base 20: mod_base = gm
  modified_base 21: mod_base = OTHER; note = 2'-O-methyluridine with a 3'-phosphorothioate linkage
  modified_base 22: mod_base = OTHER; note = 2'-O-methylcytidine with a 3'-phosphorothioate linkage
  modified_base 23: mod_base = cm
tcattctgtgctgcatcctgtcc

SEQ ID NO: 1270 - RNA, 21 nt, synthetic construct
  source 1..21: mol_type = other RNA
  modified_base 1: mod_base = OTHER; note = 2'-O-methylguanosine with a 3'-phosphorothioate linkage
  modified_base 2: mod_base = OTHER; note = 2'-O-methyluridine with a 3'-phosphorothioate linkage
  modified_base 3: mod_base = OTHER; note = 2'-O-methyladenosine
  modified_base 4: mod_base = gm
  modified_base 5: mod_base = um
  modified_base 6: mod_base = um
  modified_base 7: mod_base = cm
  modified_base 8: mod_base = OTHER; note = 2'-O-methyladenosine
  modified_base 9: mod_base = OTHER; note = 2'-fluoroadenosine
  modified_base 10: mod_base = OTHER; note = 2'-fluoroadenosine
  modified_base 11: mod_base = OTHER; note = 2'-fluorocytidine
  modified_base 12: mod_base = um
  modified_base 13: mod_base = gm
  modified_base 14: mod_base = um
  modified_base 15: mod_base = OTHER; note = 2'-O-methyladenosine
  modified_base 16: mod_base = um
  modified_base 17: mod_base = um
  modified_base 18: mod_base = OTHER; note = 2'-O-methyladenosine
  modified_base 19: mod_base = OTHER; note = 2'-O-methylcytidine with a 3'-phosphorothioate linkage
  modified_base 20: mod_base = OTHER; note = 2'-O-methyluridine with a 3'-phosphorothioate linkage
  modified_base 21: mod_base = OTHER; note = 2'-O-methyladenosine
gtagttcaaactgtattacta

SEQ ID NO: 1271 - RNA, 23 nt, synthetic construct
  source 1..23: mol_type = other RNA
  modified_base 1: mod_base = OTHER; note = 2'-O-methyluridine with a 3'-phosphorothioate linkage and a 5'-phosphate substitution
  modified_base 2: mod_base = OTHER; note = 2'-fluoroadenosine with a 3'-phosphorothioate linkage
  modified_base 3: mod_base = gm
  modified_base 4: mod_base = um
  modified_base 5: mod_base = OTHER; note = 2'-fluoroadenosine
  modified_base 6: mod_base = OTHER; note = 2'-O-methyladenosine
  modified_base 7: mod_base = OTHER; note = 2'-fluorouridine
  modified_base 8: mod_base = OTHER; note = 2'-O-methyladenosine
  modified_base 9: mod_base = cm
  modified_base 10: mod_base = OTHER; note = 2'-O-methyladenosine
  modified_base 11: mod_base = gm
  modified_base 12: mod_base = um
  modified_base 13: mod_base = um
  modified_base 14: mod_base = OTHER; note = 2'-fluorouridine
  modified_base 15: mod_base = gm
  modified_base 16: mod_base = OTHER; note = 2'-fluoroadenosine
  modified_base 17: mod_base = OTHER; note = 2'-O-methyladenosine
  modified_base 18: mod_base = cm
  modified_base 19: mod_base = um
  modified_base 20: mod_base = OTHER; note = 2'-O-methyladenosine
  modified_base 21: mod_base = OTHER; note = 2'-O-methylcytidine with a 3'-phosphorothioate linkage
  modified_base 22: mod_base = OTHER; note = 2'-O-methylcytidine with a 3'-phosphorothioate linkage
  modified_base 23: mod_base = OTHER; note = 2'-O-methyladenosine
tagtaatacagtttgaactacca

SEQ ID NO: 1272 - RNA, 21 nt, synthetic construct
  source 1..21: mol_type = other RNA
  modified_base 1: mod_base = OTHER; note = 2'-O-methylguanosine with a 3'-phosphorothioate linkage
  modified_base 2: mod_base = OTHER; note = 2'-O-methyluridine with a 3'-phosphorothioate linkage
  modified_base 3: mod_base = um
  modified_base 4: mod_base = cm
  modified_base 5: mod_base = OTHER; note = 2'-O-methyladenosine
  modified_base 6: mod_base = OTHER; note = 2'-O-methyladenosine
  modified_base 7: mod_base = OTHER; note = 2'-O-methyladenosine
  modified_base 8: mod_base = cm
  modified_base 9: mod_base = OTHER; note = 2'-fluorouridine
  modified_base 10: mod_base = OTHER; note = 2'-fluoroguanosine
  modified_base 11: mod_base = OTHER; note = 2'-fluorouridine
  modified_base 12: mod_base = OTHER; note = 2'-O-methyladenosine
  modified_base 13: mod_base = um
  modified_base 14: mod_base = um
  modified_base 15: mod_base = OTHER; note = 2'-O-methyladenosine
  modified_base 16: mod_base = cm
  modified_base 17: mod_base = um
  modified_base 18: mod_base = um
  modified_base 19: mod_base = OTHER; note = 2'-O-methyluridine with a 3'-phosphorothioate linkage
  modified_base 20: mod_base = OTHER; note = 2'-O-methyladenosine with a 3'-phosphorothioate linkage
  modified_base 21: mod_base = OTHER; note = 2'-O-methyladenosine
gttcaaactgtattactttaa

SEQ ID NO: 1273 - RNA, 23 nt, synthetic construct
  source 1..23: mol_type = other RNA
  modified_base 1: mod_base = OTHER; note = 2'-O-methyluridine with a 3'-phosphorothioate linkage and a 5'-phosphate substitution
  modified_base 2: mod_base = OTHER; note = 2'-fluorouridine with a 3'-phosphorothioate linkage
  modified_base 3: mod_base = OTHER; note = 2'-O-methyladenosine
  modified_base 4: mod_base = OTHER; note = 2'-O-methyladenosine
  modified_base 5: mod_base = OTHER; note = 2'-fluoroadenosine
  modified_base 6: mod_base = gm
  modified_base 7: mod_base = OTHER; note = 2'-fluorouridine
  modified_base 8: mod_base = OTHER; note = 2'-O-methyladenosine
  modified_base 9: mod_base = OTHER; note = 2'-O-methyladenosine
  modified_base 10: mod_base = um
  modified_base 11: mod_base = OTHER; note = 2'-O-methyladenosine
  modified_base 12: mod_base = cm
  modified_base 13: mod_base = OTHER; note = 2'-O-methyladenosine
  modified_base 14: mod_base = OTHER; note = 2'-fluoroguanosine
  modified_base 15: mod_base = um
  modified_base 16: mod_base = OTHER; note = 2'-fluorouridine
  modified_base 17: mod_base = um
  modified_base 18: mod_base = gm
  modified_base 19: mod_base = OTHER; note = 2'-O-methyladenosine
  modified_base 20: mod_base = OTHER; note = 2'-O-methyladenosine
  modified_base 21: mod_base = OTHER; note = 2'-O-methylcytidine with a 3'-phosphorothioate linkage
  modified_base 22: mod_base = OTHER; note = 2'-O-methyluridine with a 3'-phosphorothioate linkage
  modified_base 23: mod_base = OTHER; note = 2'-O-methyladenosine
ttaaagtaatacagtttgaacta

SEQ ID NO: 1274 - RNA, 21 nt, synthetic construct
  source 1..21: mol_type = other RNA
  modified_base 1: mod_base = OTHER; note = 2'-O-methyluridine with a 3'-phosphorothioate linkage
  modified_base 2: mod_base = OTHER; note = 2'-O-methyluridine with a 3'-phosphorothioate linkage
  modified_base 3: mod_base = cm
  modified_base 4: mod_base = OTHER; note = 2'-O-methyladenosine
  modified_base 5: mod_base = OTHER; note = 2'-O-methyladenosine
  modified_base 6: mod_base = OTHER; note = 2'-O-methyladenosine
  modified_base 7: mod_base = cm
  modified_base 8: mod_base = um
  modified_base 9: mod_base = OTHER; note = 2'-fluoroguanosine
  modified_base 10: mod_base = OTHER; note = 2'-fluorouridine
  modified_base 11: mod_base = OTHER; note = 2'-fluoroadenosine
  modified_base 12: mod_base = um
  modified_base 13: mod_base = um
  modified_base 14: mod_base = OTHER; note = 2'-O-methyladenosine
  modified_base 15: mod_base = cm
  modified_base 16: mod_base = um
  modified_base 17: mod_base = um
  modified_base 18: mod_base = um
  modified_base 19: mod_base = OTHER; note = 2'-O-methyladenosine with a 3'-phosphorothioate linkage
  modified_base 20: mod_base = OTHER; note = 2'-O-methyladenosine with a 3'-phosphorothioate linkage
  modified_base 21: mod_base = OTHER; note = 2'-O-methyladenosine
ttcaaactgtattactttaaa

SEQ ID NO: 1275 - RNA, 23 nt, synthetic construct
  source 1..23: mol_type = other RNA
  modified_base 1: mod_base = OTHER; note = 2'-O-methyluridine with a 3'-phosphorothioate linkage and a 5'-phosphate substitution
  modified_base 2: mod_base = OTHER; note = 2'-fluorouridine with a 3'-phosphorothioate linkage
  modified_base 3: mod_base = um
  modified_base 4: mod_base = OTHER; note = 2'-O-methyladenosine
  modified_base 5: mod_base = OTHER; note = 2'-fluoroadenosine
  modified_base 6: mod_base = OTHER; note = 2'-O-methyladenosine
  modified_base 7: mod_base = OTHER; note = 2'-fluoroguanosine
  modified_base 8: mod_base = um
  modified_base 9: mod_base = OTHER; note = 2'-O-methyladenosine
  modified_base 10: mod_base = OTHER; note = 2'-O-methyladenosine
  modified_base 11: mod_base = um
  modified_base 12: mod_base = OTHER; note = 2'-O-methyladenosine
  modified_base 13: mod_base = cm
  modified_base 14: mod_base = OTHER; note = 2'-fluoroadenosine
  modified_base 15: mod_base = gm
  modified_base 16: mod_base = OTHER; note = 2'-fluorouridine
  modified_base 17: mod_base = um
  modified_base 18: mod_base = um
  modified_base 19: mod_base = gm
  modified_base 20: mod_base = OTHER; note = 2'-O-methyladenosine
  modified_base 21: mod_base = OTHER; note = 2'-O-methyladenosine with a 3'-phosphorothioate linkage
  modified_base 22: mod_base = OTHER; note = 2'-O-methylcytidine with a 3'-phosphorothioate linkage
  modified_base 23: mod_base = um
tttaaagtaatacagtttgaact

SEQ ID NO: 1276 - RNA, 21 nt, synthetic construct
  source 1..21: mol_type = other RNA
  modified_base 1: mod_base = OTHER; note = 2'-O-methyluridine with a 3'-phosphorothioate linkage
  modified_base 2: mod_base = OTHER; note = 2'-O-methylcytidine with a 3'-phosphorothioate linkage
  modified_base 3: mod_base = OTHER; note = 2'-O-methyladenosine
  modified_base 4: mod_base = OTHER; note = 2'-O-methyladenosine
  modified_base 5: mod_base = OTHER; note = 2'-O-methyladenosine
  modified_base 6: mod_base = cm
  modified_base 7: mod_base = um
  modified_base 8: mod_base = gm
  modified_base 9: mod_base = OTHER; note = 2'-fluorouridine
  modified_base 10: mod_base = OTHER; note = 2'-fluoroadenosine
  modified_base 11: mod_base = OTHER; note = 2'-fluorouridine
  modified_base 12: mod_base = um
  modified_base 13: mod_base = OTHER; note = 2'-O-methyladenosine
  modified_base 14: mod_base = cm
  modified_base 15: mod_base = um
  modified_base 16: mod_base = um
  modified_base 17: mod_base = um
  modified_base 18: mod_base = OTHER; note = 2'-O-methyladenosine
  modified_base 19: mod_base = OTHER; note = 2'-O-methyladenosine with a 3'-phosphorothioate linkage
  modified_base 20: mod_base = OTHER; note = 2'-O-methyluridine with a 3'-phosphorothioate linkage
  modified_base 21: mod_base = OTHER; note = 2'-O-methyladenosine
tcaaactgtattactttaata

SEQ ID NO: 1277 - RNA, 23 nt, synthetic construct
  source 1..23: mol_type = other RNA
  modified_base 1: mod_base = OTHER; note = 2'-O-methyluridine with a 3'-phosphorothioate linkage and a 5'-phosphate substitution
  modified_base 2: mod_base = OTHER; note = 2'-fluoroadenosine with a 3'-phosphorothioate linkage
  modified_base 3: mod_base = um
  modified_base 4: mod_base = um
  modified_base 5: mod_base = OTHER; note = 2'-fluoroadenosine
  modified_base 6: mod_base = OTHER; note = 2'-O-methyladenosine
  modified_base 7: mod_base = OTHER; note = 2'-fluoroadenosine
  modified_base 8: mod_base = gm
  modified_base 9: mod_base = um
  modified_base 10: mod_base = OTHER; note = 2'-O-methyladenosine
  modified_base 11: mod_base = OTHER; note = 2'-O-methyladenosine
  modified_base 12: mod_base = um
  modified_base 13: mod_base = OTHER; note = 2'-O-methyladenosine
  modified_base 14: mod_base = OTHER; note = 2'-fluorocytidine
  modified_base 15: mod_base = OTHER; note = 2'-O-methyladenosine
  modified_base 16: mod_base = OTHER; note = 2'-fluoroguanosine
  modified_base 17: mod_base = um
  modified_base 18: mod_base = um
  modified_base 19: mod_base = um
  modified_base 20: mod_base = gm
  modified_base 21: mod_base = OTHER; note = 2'-O-methyladenosine with a 3'-phosphorothioate linkage
  modified_base 22: mod_base = OTHER; note = 2'-O-methyladenosine with a 3'-phosphorothioate linkage
  modified_base 23: mod_base = cm
tattaaagtaatacagtttgaac

SEQ ID NO: 1278 - RNA, 21 nt, synthetic construct
  source 1..21: mol_type = other RNA
  modified_base 1: mod_base = OTHER; note = 2'-O-methyladenosine with a 3'-phosphorothioate linkage
  modified_base 2: mod_base = OTHER; note = 2'-O-methyladenosine with a 3'-phosphorothioate linkage
  modified_base 3: mod_base = cm
  modified_base 4: mod_base = um
  modified_base 5: mod_base = gm
  modified_base 6: mod_base = um
  modified_base 7: mod_base = OTHER; note = 2'-O-methyladenosine
  modified_base 8: mod_base = um
  modified_base 9: mod_base = OTHER; note = 2'-fluorouridine
  modified_base 10: mod_base = OTHER; note = 2'-fluoroadenosine
  modified_base 11: mod_base = OTHER; note = 2'-fluorocytidine
  modified_base 12: mod_base = um
  modified_base 13: mod_base = um
  modified_base 14: mod_base = um
  modified_base 15: mod_base = OTHER; note = 2'-O-methyladenosine
  modified_base 16: mod_base = OTHER; note = 2'-O-methyladenosine
  modified_base 17: mod_base = um
  modified_base 18: mod_base = gm
  modified_base 19: mod_base = OTHER; note = 2'-O-methylguanosine with a 3'-phosphorothioate linkage
  modified_base 20: mod_base = OTHER; note = 2'-O-methyladenosine with a 3'-phosphorothioate linkage
  modified_base 21: mod_base = OTHER; note = 2'-O-methyladenosine
aactgtattactttaatggaa

SEQ ID NO: 1279 - RNA, 23 nt, synthetic construct
  source 1..23: mol_type = other RNA
  modified_base 1: mod_base = OTHER; note = 2'-O-methyluridine with a 3'-phosphorothioate linkage and a 5'-phosphate substitution
  modified_base 2: mod_base = OTHER; note = 2'-fluorouridine with a 3'-phosphorothioate linkage
  modified_base 3: mod_base = cm
  modified_base 4: mod_base = cm
  modified_base 5: mod_base = OTHER; note = 2'-fluoroadenosine
  modified_base 6: mod_base = um
  modified_base 7: mod_base = OTHER; note = 2'-fluorouridine
  modified_base 8: mod_base = OTHER; note = 2'-O-methyladenosine
  modified_base 9: mod_base = OTHER; note = 2'-O-methyladenosine
  modified_base 10: mod_base = OTHER; note = 2'-O-methyladenosine
  modified_base 11: mod_base = gm
  modified_base 12: mod_base = um
  modified_base 13: mod_base = OTHER; note = 2'-O-methyladenosine
  modified_base 14: mod_base = OTHER; note = 2'-fluoroadenosine
  modified_base 15: mod_base = um
  modified_base 16: mod_base = OTHER; note = 2'-fluoroadenosine
  modified_base 17: mod_base = cm
  modified_base 18: mod_base = OTHER; note = 2'-O-methyladenosine
  modified_base 19: mod_base = gm
  modified_base 20: mod_base = um
  modified_base 21: mod_base = OTHER; note = 2'-O-methyluridine with a 3'-phosphorothioate linkage
  modified_base 22: mod_base = OTHER; note = 2'-O-methyluridine with a 3'-phosphorothioate linkage
  modified_base 23: mod_base = gm
ttccattaaagtaatacagtttg

SEQ ID NO: 1280 - RNA, 21 nt, synthetic construct
  source 1..21: mol_type = other RNA
  modified_base 1: mod_base = OTHER; note = 2'-O-methyladenosine with a 3'-phosphorothioate linkage
  modified_base 2: mod_base = OTHER; note = 2'-O-methylcytidine with a 3'-phosphorothioate linkage
  modified_base 3: mod_base = um
  modified_base 4: mod_base = gm
  modified_base 5: mod_base = um
  modified_base 6: mod_base = OTHER; note = 2'-O-methyladenosine
  modified_base 7: mod_base = um
  modified_base 8: mod_base = um
  modified_base 9: mod_base = OTHER; note = 2'-fluoroadenosine
  modified_base 10: mod_base = OTHER; note = 2'-fluorocytidine
  modified_base 11: mod_base = OTHER; note = 2'-fluorouridine
  modified_base 12: mod_base = um
  modified_base 13: mod_base = um
  modified_base 14: mod_base = OTHER; note = 2'-O-methyladenosine
  modified_base 15: mod_base = OTHER; note = 2'-O-methyladenosine
  modified_base 16: mod_base = um
  modified_base 17: mod_base = gm
  modified_base 18: mod_base = gm
  modified_base 19: mod_base = OTHER; note = 2'-O-methyladenosine with a 3'-phosphorothioate linkage
  modified_base 20: mod_base = OTHER; note = 2'-O-methyladenosine with a 3'-phosphorothioate linkage
  modified_base 21: mod_base = OTHER; note = 2'-O-methyladenosine
actgtattactttaatggaaa

SEQ ID NO: 1281 - RNA, 23 nt, synthetic construct
  source 1..23: mol_type = other RNA
  modified_base 1: mod_base = OTHER; note = 2'-O-methyluridine with a 3'-phosphorothioate linkage and a 5'-phosphate substitution
  modified_base 2: mod_base = OTHER; note = 2'-fluorouridine with a 3'-phosphorothioate linkage
  modified_base 3: mod_base = um
  modified_base 4: mod_base = cm
  modified_base 5: mod_base = OTHER; note = 2'-fluorocytidine
  modified_base 6: mod_base = OTHER; note = 2'-O-methyladenosine
  modified_base 7: mod_base = OTHER; note = 2'-fluorouridine
  modified_base 8: mod_base = um
  modified_base 9: mod_base = OTHER; note = 2'-O-methyladenosine
  modified_base 10: mod_base = OTHER; note = 2'-O-methyladenosine
  modified_base 11: mod_base = OTHER; note = 2'-O-methyladenosine
  modified_base 12: mod_base = gm
  modified_base 13: mod_base = um
  modified_base 14: mod_base = OTHER; note = 2'-fluoroadenosine
  modified_base 15: mod_base = OTHER; note = 2'-O-methyladenosine
  modified_base 16: mod_base = OTHER; note = 2'-fluorouridine
  modified_base 17: mod_base = OTHER; note = 2'-O-methyladenosine
  modified_base 18: mod_base = cm
  modified_base 19: mod_base = OTHER; note = 2'-O-methyladenosine
  modified_base 20: mod_base = gm
  modified_base 21: mod_base = OTHER; note = 2'-O-methyluridine with a 3'-phosphorothioate linkage
  modified_base 22: mod_base = OTHER; note = 2'-O-methyluridine with a 3'-phosphorothioate linkage
  modified_base 23: mod_base = um
tttccattaaagtaatacagttt

SEQ ID NO: 1282 - RNA, 21 nt, synthetic construct
  source 1..21: mol_type = other RNA
  modified_base 1: mod_base = OTHER; note = 2'-O-methylcytidine with a 3'-phosphorothioate linkage
  modified_base 2: mod_base = OTHER; note = 2'-O-methyluridine with a 3'-phosphorothioate linkage
  modified_base 3: mod_base = gm
  modified_base 4: mod_base = um
  modified_base 5: mod_base = OTHER; note = 2'-O-methyladenosine
  modified_base 6: mod_base = um
  modified_base 7: mod_base = um
  modified_base 8: mod_base = OTHER; note = 2'-O-methyladenosine
  modified_base 9: mod_base = OTHER; note = 2'-fluorocytidine
  modified_base 10: mod_base = OTHER; note = 2'-fluorouridine
  modified_base 11: mod_base = OTHER; note = 2'-fluorouridine
  modified_base 12: mod_base = um
  modified_base 13: mod_base = OTHER; note = 2'-O-methyladenosine
  modified_base 14: mod_base = OTHER; note = 2'-O-methyladenosine
  modified_base 15: mod_base = um
  modified_base 16: mod_base = gm
  modified_base 17: mod_base = gm
  modified_base 18: mod_base = OTHER; note = 2'-O-methyladenosine
  modified_base 19: mod_base = OTHER; note = 2'-O-methyladenosine with a 3'-phosphorothioate linkage
  modified_base 20: mod_base = OTHER; note = 2'-O-methylguanosine with a 3'-phosphorothioate linkage
  modified_base 21: mod_base = OTHER; note = 2'-O-methyladenosine
ctgtattactttaatggaaga

SEQ ID NO: 1283 - RNA, 23 nt, synthetic construct
  source 1..23: mol_type = other RNA
  modified_base 1: mod_base = OTHER; note = 2'-O-methyluridine with a 3'-phosphorothioate linkage and a 5'-phosphate substitution
  modified_base 2: mod_base = OTHER; note = 2'-fluorocytidine with a 3'-phosphorothioate linkage
  modified_base 3: mod_base = um
  modified_base 4: mod_base = um
  modified_base 5: mod_base = OTHER; note = 2'-fluorocytidine
  modified_base 6: mod_base = cm
  modified_base 7: mod_base = OTHER; note = 2'-fluoroadenosine
  modified_base 8: mod_base = um
  modified_base 9: mod_base = um
  modified_base 10: mod_base = OTHER; note = 2'-O-methyladenosine
  modified_base 11: mod_base = OTHER; note = 2'-O-methyladenosine
  modified_base 12: mod_base = OTHER; note = 2'-O-methyladenosine
  modified_base 13: mod_base = gm
  modified_base 14: mod_base = OTHER; note = 2'-fluorouridine
  modified_base 15: mod_base = OTHER; note = 2'-O-methyladenosine
  modified_base 16: mod_base = OTHER; note = 2'-fluoroadenosine
  modified_base 17: mod_base = um
  modified_base 18: mod_base = OTHER; note = 2'-O-methyladenosine
  modified_base 19: mod_base = cm
  modified_base 20: mod_base = OTHER; note = 2'-O-methyladenosine
  modified_base 21: mod_base = OTHER; note = 2'-O-methylguanosine with a 3'-phosphorothioate linkage
  modified_base 22: mod_base = OTHER; note = 2'-O-methyluridine with a 3'-phosphorothioate linkage
  modified_base 23: mod_base = um
tcttccattaaagtaatacagtt

SEQ ID NO: 1284 - RNA, 21 nt, synthetic construct
  source 1..21: mol_type = other RNA
  modified_base 1: mod_base = OTHER; note = 2'-O-methyluridine with a 3'-phosphorothioate linkage
  modified_base 2: mod_base = OTHER; note = 2'-O-methylguanosine with a 3'-phosphorothioate linkage
  modified_base 3: mod_base = um
  modified_base 4: mod_base = OTHER; note = 2'-O-methyladenosine
  modified_base 5: mod_base = um
  modified_base 6: mod_base = um
  modified_base 7: mod_base = OTHER; note = 2'-O-methyladenosine
  modified_base 8: mod_base = cm
  modified_base 9: mod_base = OTHER; note = 2'-fluorouridine
  modified_base 10: mod_base = OTHER; note = 2'-fluorouridine
  modified_base 11: mod_base = OTHER; note = 2'-fluorouridine
  modified_base 12: mod_base = OTHER; note = 2'-O-methyladenosine
  modified_base 13: mod_base = OTHER; note = 2'-O-methyladenosine
  modified_base 14: mod_base = um
  modified_base 15: mod_base = gm
  modified_base 16: mod_base = gm
  modified_base 17: mod_base = OTHER; note = 2'-O-methyladenosine
  modified_base 18: mod_base = OTHER; note = 2'-O-methyladenosine
  modified_base 19: mod_base = OTHER; note = 2'-O-methylguanosine with a 3'-phosphorothioate linkage
  modified_base 20: mod_base = OTHER; note = 2'-O-methylcytidine with a 3'-phosphorothioate linkage
  modified_base 21: mod_base = OTHER; note = 2'-O-methyladenosine
tgtattactttaatggaagca

SEQ ID NO: 1285 - RNA, 23 nt, synthetic construct
  source 1..23: mol_type = other RNA
  modified_base 1: mod_base = OTHER; note = 2'-O-methyluridine with a 3'-phosphorothioate linkage and a 5'-phosphate substitution
  modified_base 2: mod_base = OTHER; note = 2'-fluoroguanosine with a 3'-phosphorothioate linkage
  modified_base 3: mod_base = cm
  modified_base 4: mod_base = um
  modified_base 5: mod_base = OTHER; note = 2'-fluorouridine
  modified_base 6: mod_base = cm
  modified_base 7: mod_base = OTHER; note = 2'-fluorocytidine
  modified_base 8: mod_base = OTHER; note = 2'-O-methyladenosine
  modified_base 9: mod_base = um
  modified_base 10: mod_base = um
  modified_base 11: mod_base = OTHER; note = 2'-O-methyladenosine
  modified_base 12: mod_base = OTHER; note = 2'-O-methyladenosine
  modified_base 13: mod_base = OTHER; note = 2'-O-methyladenosine
  modified_base 14: mod_base = OTHER; note = 2'-fluoroguanosine
  modified_base 15: mod_base = um
  modified_base 16: mod_base = OTHER; note = 2'-fluoroadenosine
  modified_base 17: mod_base = OTHER; note = 2'-O-methyladenosine
  modified_base 18: mod_base = um
  modified_base 19: mod_base = OTHER; note = 2'-O-methyladenosine
  modified_base 20: mod_base = cm
  modified_base 21: mod_base = OTHER; note = 2'-O-methyladenosine with a 3'-phosphorothioate linkage
  modified_base 22: mod_base = OTHER; note = 2'-O-methylguanosine with a 3'-phosphorothioate linkage
  modified_base 23: mod_base = um
tgcttccattaaagtaatacagt

SEQ ID NO: 1286 - RNA, 21 nt, synthetic construct
  source 1..21: mol_type = other RNA
  modified_base 1: mod_base = OTHER; note = 2'-O-methyluridine with a 3'-phosphorothioate linkage
  modified_base 2: mod_base = OTHER; note = 2'-O-methyluridine with a 3'-phosphorothioate linkage
  modified_base 3: mod_base = OTHER; note = 2'-O-methyladenosine
  modified_base 4: mod_base = um
  modified_base 5: mod_base = OTHER; note = 2'-O-methyladenosine
  modified_base 6: mod_base = um
  modified_base 7: mod_base = OTHER; note = 2'-O-methyladenosine
  modified_base 8: mod_base = um
  modified_base 9: mod_base = OTHER; note = 2'-fluorocytidine
  modified_base 10: mod_base = OTHER; note = 2'-fluoroadenosine
  modified_base 11: mod_base = OTHER; note = 2'-fluoroguanosine
  modified_base 12: mod_base = cm
  modified_base 13: mod_base = um
  modified_base 14: mod_base = gm
  modified_base 15: mod_base = cm
  modified_base 16: mod_base = OTHER; note = 2'-O-methyladenosine
  modified_base 17: mod_base = cm
  modified_base 18: mod_base = cm
  modified_base 19: mod_base = OTHER; note = 2'-O-methyladenosine with a 3'-phosphorothioate linkage
  modified_base 20: mod_base = OTHER; note = 2'-O-methyluridine with a 3'-phosphorothioate linkage
  modified_base 21: mod_base = OTHER; note = 2'-O-methyladenosine
ttatatatcagctgcaccata

SEQ ID NO: 1287 - RNA, 23 nt, synthetic construct
  source 1..23: mol_type = other RNA
  modified_base 1: mod_base = OTHER; note = 2'-O-methyluridine with a 3'-phosphorothioate linkage and a 5'-phosphate substitution
  modified_base 2: mod_base = OTHER; note = 2'-fluoroadenosine with a 3'-phosphorothioate linkage
  modified_base 3: mod_base = um
  modified_base 4: mod_base = gm
  modified_base 5: mod_base = OTHER; note = 2'-fluoroguanosine
  modified_base 6: mod_base = um
  modified_base 7: mod_base = OTHER; note = 2'-fluoroguanosine
  modified_base 8: mod_base = cm
  modified_base 9: mod_base = OTHER; note = 2'-O-methyladenosine
  modified_base 10: mod_base = gm
  modified_base 11: mod_base = cm
  modified_base 12: mod_base = um
  modified_base 13: mod_base = gm
  modified_base 14: mod_base = OTHER; note = 2'-fluoroadenosine
  modified_base 15: mod_base = um
  modified_base 16: mod_base = OTHER; note = 2'-fluoroadenosine
  modified_base 17: mod_base = um
  modified_base 18: mod_base = OTHER; note = 2'-O-methyladenosine
  modified_base 19: mod_base = um
  modified_base 20: mod_base = OTHER; note = 2'-O-methyladenosine
  modified_base 21: mod_base = OTHER; note = 2'-O-methyladenosine with a 3'-phosphorothioate linkage
  modified_base 22: mod_base = OTHER; note = 2'-O-methyladenosine with a 3'-phosphorothioate linkage
  modified_base 23: mod_base = um
tatggtgcagctgatatataaat

SEQ ID NO: 1288 - RNA, 21 nt, synthetic construct
  source 1..21: mol_type = other RNA
  modified_base 1: mod_base = OTHER; note = 2'-O-methyluridine with a 3'-phosphorothioate linkage
  modified_base 2: mod_base = OTHER; note = 2'-O-methyladenosine with a 3'-phosphorothioate linkage
  modified_base 3: mod_base = um
  modified_base 4: mod_base = OTHER; note = 2'-O-methyladenosine
  modified_base 5: mod_base = um
  modified_base 6: mod_base = OTHER; note = 2'-O-methyladenosine
  modified_base 7: mod_base = um
  modified_base 8: mod_base = cm
  modified_base 9: mod_base = OTHER; note = 2'-fluoroadenosine
  modified_base 10: mod_base = OTHER; note = 2'-fluoroguanosine
  modified_base 11: mod_base = OTHER; note = 2'-fluorocytidine
  modified_base 12: mod_base = um
  modified_base 13: mod_base = gm
  modified_base 14: mod_base = cm
  modified_base 15: mod_base = OTHER; note = 2'-O-methyladenosine
  modified_base 16: mod_base = cm
  modified_base 17: mod_base = cm
  modified_base 18: mod_base = OTHER; note = 2'-O-methyladenosine
  modified_base 19: mod_base = OTHER; note = 2'-O-methyluridine with a 3'-phosphorothioate linkage
  modified_base 20: mod_base = OTHER; note = 2'-O-methylguanosine with a 3'-phosphorothioate linkage
  modified_base 21: mod_base = OTHER; note = 2'-O-methyladenosine
tatatatcagctgcaccatga

SEQ ID NO: 1289 - RNA, 23 nt, synthetic construct
  source 1..23: mol_type = other RNA
  modified_base 1: mod_base = OTHER; note = 2'-O-methyluridine with a 3'-phosphorothioate linkage and a 5'-phosphate substitution
  modified_base 2: mod_base = OTHER; note = 2'-fluorocytidine with a 3'-phosphorothioate linkage
  modified_base 3: mod_base = OTHER; note = 2'-O-methyladenosine
  modified_base 4: mod_base = um
  modified_base 5: mod_base = OTHER; note = 2'-fluoroguanosine
  modified_base 6: mod_base = gm
  modified_base 7: mod_base = OTHER; note = 2'-fluorouridine
  modified_base 8: mod_base = gm
  modified_base 9: mod_base = cm
  modified_base 10: mod_base = OTHER; note = 2'-O-methyladenosine
  modified_base 11: mod_base = gm
  modified_base 12: mod_base = cm
  modified_base 13: mod_base = um
  modified_base 14: mod_base = OTHER; note = 2'-fluoroguanosine
  modified_base 15: mod_base = OTHER; note = 2'-O-methyladenosine
  modified_base 16: mod_base = OTHER; note = 2'-fluorouridine
  modified_base 17: mod_base = OTHER; note = 2'-O-methyladenosine
  modified_base 18: mod_base = um
  modified_base 19: mod_base = OTHER; note = 2'-O-methyladenosine
  modified_base 20: mod_base = um
  modified_base 21: mod_base = OTHER; note = 2'-O-methyladenosine with a 3'-phosphorothioate linkage
  modified_base 22: mod_base = OTHER; note = 2'-O-methyladenosine with a 3'-phosphorothioate linkage
  modified_base 23: mod_base = OTHER; note = 2'-O-methyladenosine
tcatggtgcagctgatatataaa

SEQ ID NO: 1290 - RNA, 21 nt, synthetic construct
  source 1..21: mol_type = other RNA
  modified_base 1: mod_base = OTHER; note = 2'-O-methyladenosine with a 3'-phosphorothioate linkage
  modified_base 2: mod_base = OTHER; note = 2'-O-methyluridine with a 3'-phosphorothioate linkage
  modified_base 3: mod_base = OTHER; note = 2'-O-methyladenosine
  modified_base 4: mod_base = um
  modified_base 5: mod_base = OTHER; note = 2'-O-methyladenosine
  modified_base 6: mod_base = um
  modified_base 7: mod_base = cm
  modified_base 8: mod_base = OTHER; note = 2'-O-methyladenosine
  modified_base 9: mod_base = OTHER; note = 2'-fluoroguanosine
  modified_base 10: mod_base = OTHER; note = 2'-fluorocytidine
  modified_base 11: mod_base = OTHER; note = 2'-fluorouridine
  modified_base 12: mod_base = gm
  modified_base 13: mod_base = cm
  modified_base 14: mod_base = OTHER; note = 2'-O-methyladenosine
  modified_base 15: mod_base = cm
  modified_base 16: mod_base = cm
  modified_base 17: mod_base = OTHER; note = 2'-O-methyladenosine
  modified_base 18: mod_base = um
  modified_base 19: mod_base = OTHER; note = 2'-O-methylguanosine with a 3'-phosphorothioate linkage
  modified_base 20: mod_base = OTHER; note = 2'-O-methylcytidine with a 3'-phosphorothioate linkage
  modified_base 21: mod_base = OTHER; note = 2'-O-methyladenosine
atatatcagctgcaccatgca

SEQ ID NO: 1291 - RNA, 23 nt, synthetic construct
  source 1..23: mol_type = other RNA
  modified_base 1: mod_base = OTHER; note = 2'-O-methyluridine with a 3'-phosphorothioate linkage and a 5'-phosphate substitution
  modified_base 2: mod_base = OTHER; note = 2'-fluoroguanosine with a 3'-phosphorothioate linkage
  modified_base 3: mod_base = cm
  modified_base 4: mod_base = OTHER; note = 2'-O-methyladenosine
  modified_base 5: mod_base = OTHER; note = 2'-fluorouridine
  modified_base 6: mod_base = gm
  modified_base 7: mod_base = OTHER; note = 2'-fluoroguanosine
  modified_base 8: mod_base = um
  modified_base 9: mod_base = gm
  modified_base 10: mod_base = cm
  modified_base 11: mod_base = OTHER; note = 2'-O-methyladenosine
  modified_base 12: mod_base = gm
  modified_base 13: mod_base = cm
  modified_base 14: mod_base = OTHER; note = 2'-fluorouridine
  modified_base 15: mod_base = gm
  modified_base 16: mod_base = OTHER; note = 2'-fluoroadenosine
  modified_base 17: mod_base = um
  modified_base 18: mod_base = OTHER; note = 2'-O-methyladenosine
  modified_base 19: mod_base = um
  modified_base 20: mod_base = OTHER; note = 2'-O-methyladenosine
  modified_base 21: mod_base = OTHER; note = 2'-O-methyluridine with a 3'-phosphorothioate linkage
  modified_base 22: mod_base = OTHER; note = 2'-O-methyladenosine with a 3'-phosphorothioate linkage
  modified_base 23: mod_base = OTHER; note = 2'-O-methyladenosine
tgcatggtgcagctgatatataa

SEQ ID NO: 1292 - RNA, 21 nt, synthetic construct
  source 1..21: mol_type = other RNA
  modified_base 1: mod_base = OTHER; note = 2'-O-methyluridine with a 3'-phosphorothioate linkage
  modified_base 2: mod_base = OTHER; note = 2'-O-methyladenosine with a 3'-phosphorothioate linkage
  modified_base 3: mod_base = um
  modified_base 4: mod_base = OTHER; note = 2'-O-methyladenosine
  modified_base 5: mod_base = um
  modified_base 6: mod_base = cm
  modified_base 7: mod_base = OTHER; note = 2'-O-methyladenosine
  modified_base 8: mod_base = gm
  modified_base 9: mod_base = OTHER; note = 2'-fluorocytidine
  modified_base 10: mod_base = OTHER; note = 2'-fluorouridine
  modified_base 11: mod_base = OTHER; note = 2'-fluoroguanosine
  modified_base 12: mod_base = cm
  modified_base 13: mod_base = OTHER; note = 2'-O-methyladenosine
  modified_base 14: mod_base = cm
  modified_base 15: mod_base = cm
  modified_base 16: mod_base = OTHER; note = 2'-O-methyladenosine
  modified_base 17: mod_base = um
  modified_base 18: mod_base = gm
  modified_base 19: mod_base = OTHER; note = 2'-O-methylcytidine with a 3'-phosphorothioate linkage
  modified_base 20: mod_base = OTHER; note = 2'-O-methylcytidine with a 3'-phosphorothioate linkage
  modified_base 21: mod_base = OTHER; note = 2'-O-methyladenosine
tatatcagctgcaccatgcca

SEQ ID NO: 1293 - RNA, 23 nt, synthetic construct
  source 1..23: mol_type = other RNA
  modified_base 1: mod_base = OTHER; note = 2'-O-methyluridine with a 3'-phosphorothioate linkage and a 5'-phosphate substitution
  modified_base 2: mod_base = OTHER; note = 2'-fluoroguanosine with a 3'-phosphorothioate linkage
  modified_base 3: mod_base = gm
  modified_base 4: mod_base = cm
  modified_base 5: mod_base = OTHER; note = 2'-fluoroadenosine
  modified_base 6: mod_base = um
  modified_base 7: mod_base = OTHER; note = 2'-fluoroguanosine
  modified_base 8: mod_base = gm
  modified_base 9: mod_base = um
  modified_base 10: mod_base = gm
  modified_base 11: mod_base = cm
  modified_base 12: mod_base = OTHER; note = 2'-O-methyladenosine
  modified_base 13: mod_base = gm
  modified_base 14: mod_base = OTHER; note = 2'-fluorocytidine
  modified_base 15: mod_base = um
  modified_base 16: mod_base = OTHER; note = 2'-fluoroguanosine
  modified_base 17: mod_base = OTHER; note = 2'-O-methyladenosine
  modified_base 18: mod_base = um
  modified_base 19: mod_base = OTHER; note = 2'-O-methyladenosine
  modified_base 20: mod_base = um
  modified_base 21: mod_base = OTHER; note = 2'-O-methyladenosine with a 3'-phosphorothioate linkage
  modified_base 22: mod_base = OTHER; note = 2'-O-methyluridine with a 3'-phosphorothioate linkage
  modified_base 23: mod_base = OTHER; note = 2'-O-methyladenosine
tggcatggtgcagctgatatata

SEQ ID NO: 1294 - RNA, 21 nt, synthetic construct
  source 1..21: mol_type = other RNA
  modified_base 1: mod_base = OTHER; note = 2'-O-methyladenosine with a 3'-phosphorothioate linkage
  modified_base 2: mod_base = OTHER; note = 2'-O-methyluridine with a 3'-phosphorothioate linkage
  modified_base 3: mod_base = OTHER; note = 2'-O-methyladenosine
  modified_base 4: mod_base = um
  modified_base 5: mod_base = cm
  modified_base 6: mod_base = OTHER; note = 2'-O-methyladenosine
  modified_base 7: mod_base = gm
  modified_base 8: mod_base = cm
  modified_base 9: mod_base = OTHER; note = 2'-fluorouridine
  modified_base 10: mod_base = OTHER; note = 2'-fluoroguanosine
  modified_base 11: mod_base = OTHER; note = 2'-fluorocytidine
  modified_base 12: mod_base = OTHER; note = 2'-O-methyladenosine
  modified_base 13: mod_base = cm
  modified_base 14: mod_base = cm
  modified_base 15: mod_base = OTHER; note = 2'-O-methyladenosine
  modified_base 16: mod_base = um
  modified_base 17: mod_base = gm
  modified_base 18: mod_base = cm
  modified_base 19: mod_base = OTHER; note = 2'-O-methylcytidine with a 3'-phosphorothioate linkage
  modified_base 20: mod_base = OTHER; note = 2'-O-methyladenosine with a 3'-phosphorothioate linkage
  modified_base 21: mod_base = OTHER; note = 2'-O-methyladenosine
atatcagctgcaccatgccaa

SEQ ID NO: 1295 - RNA, 23 nt, synthetic construct
  source 1..23: mol_type = other RNA
  modified_base 1: mod_base = OTHER; note = 2'-O-methyluridine with a 3'-phosphorothioate linkage and a 5'-phosphate substitution
  modified_base 2: mod_base = OTHER; note = 2'-fluorouridine with a 3'-phosphorothioate linkage
  modified_base 3: mod_base = gm
  modified_base 4: mod_base = gm
  modified_base 5: mod_base = OTHER; note = 2'-fluorocytidine
  modified_base 6: mod_base = OTHER; note = 2'-O-methyladenosine
  modified_base 7: mod_base = OTHER; note = 2'-fluorouridine
  modified_base 8: mod_base = gm
  modified_base 9: mod_base = gm
  modified_base 10: mod_base = um
  modified_base 11: mod_base = gm
  modified_base 12: mod_base = cm
  modified_base 13: mod_base = OTHER; note = 2'-O-methyladenosine
  modified_base 14: mod_base = OTHER; note = 2'-fluoroguanosine
  modified_base 15: mod_base = cm
  modified_base 16: mod_base = OTHER; note = 2'-fluorouridine
  modified_base 17: mod_base = gm
  modified_base 18: mod_base = OTHER; note = 2'-O-methyladenosine
  modified_base 19: mod_base = um
  modified_base 20: mod_base = OTHER; note = 2'-O-methyladenosine
  modified_base 21: mod_base = OTHER; note = 2'-O-methyluridine with a 3'-phosphorothioate linkage
  modified_base 22: mod_base = OTHER; note = 2'-O-methyladenosine with a 3'-phosphorothioate linkage
  modified_base 23: mod_base = um
ttggcatggtgcagctgatatat

SEQ ID NO: 1296 - RNA, 21 nt, synthetic construct
  source 1..21: mol_type = other RNA
  modified_base 1: mod_base = OTHER; note = 2'-O-methyladenosine with a 3'-phosphorothioate linkage
  modified_base 2: mod_base = OTHER; note = 2'-O-methyluridine with a 3'-phosphorothioate linkage
  modified_base 3: mod_base = cm
  modified_base 4: mod_base = OTHER; note = 2'-O-methyladenosine
  modified_base 5: mod_base = gm
  modified_base 6: mod_base = cm
  modified_base 7: mod_base = um
  modified_base 8: mod_base = gm
  modified_base 9: mod_base = OTHER; note = 2'-fluorocytidine
  modified_base 10: mod_base = OTHER; note = 2'-fluoroadenosine
  modified_base 11: mod_base = OTHER; note = 2'-fluorocytidine
  modified_base 12: mod_base = cm
  modified_base 13: mod_base = OTHER; note = 2'-O-methyladenosine
  modified_base 14: mod_base = um
  modified_base 15: mod_base = gm
  modified_base 16: mod_base = cm
  modified_base 17: mod_base = cm
  modified_base 18: mod_base = OTHER; note = 2'-O-methyladenosine
  modified_base 19: mod_base = OTHER; note = 2'-O-methyluridine with a 3'-phosphorothioate linkage
  modified_base 20: mod_base = OTHER; note = 2'-O-methylcytidine with a 3'-phosphorothioate linkage
  modified_base 21: mod_base = OTHER; note = 2'-O-methyladenosine
atcagctgcaccatgccatca

SEQ ID NO: 1297 - RNA, 23 nt, synthetic construct
  source 1..23: mol_type = other RNA
  modified_base 1: mod_base = OTHER; note = 2'-O-methyluridine with a 3'-phosphorothioate linkage and a 5'-phosphate substitution
  modified_base 2: mod_base = OTHER; note = 2'-fluoroguanosine with a 3'-phosphorothioate linkage
  modified_base 3: mod_base = OTHER; note = 2'-O-methyladenosine
  modified_base 4: mod_base = um
  modified_base 5: mod_base = OTHER; note = 2'-fluoroguanosine
  modified_base 6: mod_base = gm
  modified_base 7: mod_base = OTHER; note = 2'-fluorocytidine
  modified_base 8: mod_base = OTHER; note = 2'-O-methyladenosine
  modified_base 9: mod_base = um
  modified_base 10: mod_base = gm
  modified_base 11: mod_base = gm
  modified_base 12: mod_base = um
  modified_base 13: mod_base = gm
  modified_base 14: mod_base = OTHER; note = 2'-fluorocytidine
  modified_base 15: mod_base = OTHER; note = 2'-O-methyladenosine
  modified_base 16: mod_base = OTHER; note = 2'-fluoroguanosine
  modified_base 17: mod_base = cm
  modified_base 18: mod_base = um
  modified_base 19: mod_base = gm
  modified_base 20: mod_base = OTHER; note = 2'-O-methyladenosine
  modified_base 21: mod_base = OTHER; note = 2'-O-methyluridine with a 3'-phosphorothioate linkage
  modified_base 22: mod_base = OTHER; note = 2'-O-methyladenosine with a 3'-phosphorothioate linkage
  modified_base 23: mod_base = um
tgatggcatggtgcagctgatat

SEQ ID NO: 1298 - RNA, 21 nt, synthetic construct
  source 1..21: mol_type = other RNA
  modified_base 1: mod_base = OTHER; note = 2'-O-methyluridine with a 3'-phosphorothioate linkage
  modified_base 2: mod_base = OTHER; note = 2'-O-methyluridine with a 3'-phosphorothioate linkage
  modified_base 3: mod_base = um
  modified_base 4: mod_base = gm
  modified_base 5: mod_base = cm
  modified_base 6: mod_base = OTHER; note = 2'-O-methyladenosine
  modified_base 7: mod_base = gm
  modified_base 8: mod_base = OTHER; note = 2'-O-methyladenosine
  modified_base 9: mod_base = OTHER; note = 2'-fluorouridine
  modified_base 10: mod_base = OTHER; note = 2'-fluoroguanosine
  modified_base 11: mod_base = OTHER; note = 2'-fluorocytidine
  modified_base 12: mod_base = um
  modified_base 13: mod_base = OTHER; note = 2'-O-methyladenosine
  modified_base 14: mod_base = gm
  modified_base 15: mod_base = gm
  modified_base 16: mod_base = um
  modified_base 17: mod_base = gm
  modified_base 18: mod_base = um
  modified_base 19: mod_base = OTHER; note = 2'-O-methyluridine with a 3'-phosphorothioate linkage
  modified_base 20: mod_base = OTHER; note = 2'-O-methylcytidine with a 3'-phosphorothioate linkage
  modified_base 21: mod_base = OTHER; note = 2'-O-methyladenosine
tttgcagatgctaggtgttca

SEQ ID NO: 1299 - RNA, 23 nt, synthetic construct
  source 1..23: mol_type = other RNA
  modified_base 1: mod_base = OTHER; note = 2'-O-methyluridine with a 3'-phosphorothioate linkage and a 5'-phosphate substitution
  modified_base 2: mod_base = OTHER; note = 2'-fluoroguanosine with a 3'-phosphorothioate linkage
  modified_base 3: mod_base = OTHER; note = 2'-O-methyladenosine
  modified_base 4: mod_base = OTHER; note = 2'-O-methyladenosine
  modified_base 5: mod_base = OTHER; note = 2'-fluorocytidine
  modified_base 6: mod_base = OTHER; note = 2'-O-methyladenosine
  modified_base 7: mod_base = OTHER; note = 2'-fluorocytidine
  modified_base 8: mod_base = cm
  modified_base 9: mod_base = um
  modified_base 10: mod_base = OTHER; note = 2'-O-methyladenosine
  modified_base 11: mod_base = gm
  modified_base 12: mod_base = cm
  modified_base 13: mod_base = OTHER; note = 2'-O-methyladenosine
  modified_base 14: mod_base = OTHER; note = 2'-fluorouridine
  modified_base 15: mod_base = cm
  modified_base 16: mod_base = OTHER; note = 2'-fluorouridine
  modified_base 17: mod_base = gm
  modified_base 18: mod_base = cm
  modified_base 19: mod_base = OTHER; note = 2'-O-methyladenosine
  modified_base 20: mod_base = OTHER; note = 2'-O-methyladenosine
  modified_base 21: mod_base = OTHER; note = 2'-O-methyladenosine with a 3'-phosphorothioate linkage
  modified_base 22: mod_base = OTHER; note = 2'-O-methylcytidine with a 3'-phosphorothioate linkage
  modified_base 23: mod_base = OTHER; note = 2'-O-methyladenosine
tgaacacctagcatctgcaaaca

SEQ ID NO: 1300 - RNA, 21 nt, synthetic construct
  source 1..21: mol_type = other RNA
  modified_base 1: mod_base = OTHER; note = 2'-O-methyluridine with a 3'-phosphorothioate linkage
  modified_base 2: mod_base = OTHER; note = 2'-O-methylguanosine with a 3'-phosphorothioate linkage
  modified_base 3: mod_base = cm
  modified_base 4: mod_base = OTHER; note = 2'-O-methyladenosine
  modified_base 5: mod_base = gm
  modified_base 6: mod_base = OTHER; note = 2'-O-methyladenosine
  modified_base 7: mod_base = um
  modified_base 8: mod_base = gm
  modified_base 9: mod_base = OTHER; note = 2'-fluorocytidine
  modified_base 10: mod_base = OTHER; note = 2'-fluorouridine
  modified_base 11: mod_base = OTHER; note = 2'-fluoroadenosine
  modified_base 12: mod_base = gm
  modified_base 13: mod_base = gm
  modified_base 14: mod_base = um
  modified_base 15: mod_base = gm
  modified_base 16: mod_base = um
  modified_base 17: mod_base = um
  modified_base 18: mod_base = cm
  modified_base 19: mod_base = OTHER; note = 2'-O-methyladenosine with a 3'-phosphorothioate linkage
  modified_base 20: mod_base = OTHER; note = 2'-O-methyladenosine with a 3'-phosphorothioate linkage
  modified_base 21: mod_base = OTHER; note = 2'-O-methyladenosine
tgcagatgctaggtgttcaaa

SEQ ID NO: 1301 - RNA, 23 nt, synthetic construct
  source 1..23: mol_type = other RNA
  modified_base 1: mod_base = OTHER; note = 2'-O-methyluridine with a 3'-phosphorothioate linkage and a 5'-phosphate substitution
  modified_base 2: mod_base = OTHER; note = 2'-fluorouridine with a 3'-phosphorothioate linkage
  modified_base 3: mod_base = um
  modified_base 4: mod_base = gm
  modified_base 5: mod_base = OTHER; note = 2'-fluoroadenosine
  modified_base 6: mod_base = OTHER; note = 2'-O-methyladenosine
  modified_base 7: mod_base = OTHER; note = 2'-fluorocytidine
  modified_base 8: mod_base = OTHER; note = 2'-O-methyladenosine
  modified_base 9: mod_base = cm
  modified_base 10: mod_base = cm
  modified_base 11: mod_base = um
  modified_base 12: mod_base = OTHER; note = 2'-O-methyladenosine
  modified_base 13: mod_base = gm
  modified_base 14: mod_base = OTHER; note = 2'-fluorocytidine
  modified_base 15: mod_base = OTHER; note = 2'-O-methyladenosine
  modified_base 16: mod_base = OTHER; note = 2'-fluorouridine
  modified_base 17: mod_base = cm
  modified_base 18: mod_base = um
  modified_base 19: mod_base = gm
  modified_base 20: mod_base = cm
  modified_base 21: mod_base = OTHER; note = 2'-O-methyladenosine with a 3'-phosphorothioate linkage
  modified_base 22: mod_base = OTHER; note = 2'-O-methyladenosine with a 3'-phosphorothioate linkage
  modified_base 23: mod_base = OTHER; note = 2'-O-methyladenosine
tttgaacacctagcatctgcaaa

SEQ ID NO: 1302 - RNA, 21 nt, synthetic construct
  source 1..21: mol_type = other RNA
  modified_base 1: mod_base = OTHER; note = 2'-O-methylguanosine with a 3'-phosphorothioate linkage
  modified_base 2: mod_base = OTHER; note = 2'-O-methylcytidine with a 3'-phosphorothioate linkage
  modified_base 3: mod_base = OTHER; note = 2'-O-methyladenosine
  modified_base 4: mod_base = gm
  modified_base 5: mod_base = OTHER; note = 2'-O-methyladenosine
  modified_base 6: mod_base = um
  modified_base 7: mod_base = gm
  modified_base 8: mod_base = cm
  modified_base 9: mod_base = OTHER; note = 2'-fluorouridine
  modified_base 10: mod_base = OTHER; note = 2'-fluoroadenosine
  modified_base 11: mod_base = OTHER; note = 2'-fluoroguanosine
  modified_base 12: mod_base = gm
  modified_base 13: mod_base = um
  modified_base 14: mod_base = gm
  modified_base 15: mod_base = um
  modified_base 16: mod_base = um
  modified_base 17: mod_base = cm
  modified_base 18: mod_base = OTHER; note = 2'-O-methyladenosine
  modified_base 19: mod_base = OTHER; note = 2'-O-methyladenosine with a 3'-phosphorothioate linkage
  modified_base 20: mod_base = OTHER; note = 2'-O-methylguanosine with a 3'-phosphorothioate linkage
  modified_base 21: mod_base = OTHER; note = 2'-O-methyladenosine
gcagatgctaggtgttcaaga

SEQ ID NO: 1303 - RNA, 23 nt, synthetic construct
  source 1..23: mol_type = other RNA
  modified_base 1: mod_base = OTHER; note = 2'-O-methyluridine with a 3'-phosphorothioate linkage and a 5'-phosphate substitution
  modified_base 2: mod_base = OTHER; note = 2'-fluorocytidine with a 3'-phosphorothioate linkage
  modified_base 3: mod_base = um
  modified_base 4: mod_base = um
  modified_base 5: mod_base = OTHER; note = 2'-fluoroguanosine
  modified_base 6: mod_base = OTHER; note = 2'-O-methyladenosine
  modified_base 7: mod_base = OTHER; note = 2'-fluoroadenosine
  modified_base 8: mod_base = cm
  modified_base 9: mod_base = OTHER; note = 2'-O-methyladenosine
  modified_base 10: mod_base = cm
  modified_base 11: mod_base = cm
  modified_base 12: mod_base = um
  modified_base 13: mod_base = OTHER; note = 2'-O-methyladenosine
  modified_base 14: mod_base = OTHER; note = 2'-fluoroguanosine
  modified_base 15: mod_base = cm
  modified_base 16: mod_base = OTHER; note = 2'-fluoroadenosine
  modified_base 17: mod_base = um
  modified_base 18: mod_base = cm
  modified_base 19: mod_base = um
  modified_base 20: mod_base = gm
  modified_base 21: mod_base = OTHER; note = 2'-O-methylcytidine with a 3'-phosphorothioate linkage
  modified_base 22: mod_base = OTHER; note = 2'-O-methyladenosine with a 3'-phosphorothioate linkage
  modified_base 23: mod_base = OTHER; note = 2'-O-methyladenosine
tcttgaacacctagcatctgcaa

SEQ ID NO: 1304 - RNA, 21 nt, synthetic construct
  source 1..21: mol_type = other RNA
  modified_base 1: mod_base = OTHER; note = 2'-O-methylcytidine with a 3'-phosphorothioate linkage
  modified_base 2: mod_base = OTHER; note = 2'-O-methyladenosine with a 3'-phosphorothioate linkage
  modified_base 3: mod_base = gm
  modified_base 4: mod_base = OTHER; note = 2'-O-methyladenosine
  modified_base 5: mod_base = um
  modified_base 6: mod_base = gm
  modified_base 7: mod_base = cm
  modified_base 8: mod_base = um
  modified_base 9: mod_base = OTHER; note = 2'-fluoroadenosine
  modified_base 10: mod_base = OTHER; note = 2'-fluoroguanosine
  modified_base 11: mod_base = OTHER; note = 2'-fluoroguanosine
  modified_base 12: mod_base = um
  modified_base 13: mod_base = gm
  modified_base 14: mod_base = um
  modified_base 15: mod_base = um
  modified_base 16: mod_base = cm
  modified_base 17: mod_base = OTHER; note = 2'-O-methyladenosine
  modified_base 18: mod_base = OTHER; note = 2'-O-methyladenosine
  modified_base 19: mod_base = OTHER; note = 2'-O-methylguanosine with a 3'-phosphorothioate linkage
  modified_base 20: mod_base = OTHER; note = 2'-O-methylguanosine with a 3'-phosphorothioate linkage
  modified_base 21: mod_base = OTHER; note = 2'-O-methyladenosine
cagatgctaggtgttcaagga

SEQ ID NO: 1305 - RNA, 23 nt, synthetic construct
  source 1..23: mol_type = other RNA
  modified_base 1: mod_base = OTHER; note = 2'-O-methyluridine with a 3'-phosphorothioate linkage and a 5'-phosphate substitution
  modified_base 2: mod_base = OTHER; note = 2'-fluorocytidine with a 3'-phosphorothioate linkage
  modified_base 3: mod_base = cm
  modified_base 4: mod_base = um
  modified_base 5: mod_base = OTHER; note = 2'-fluorouridine
  modified_base 6: mod_base = gm
  modified_base 7: mod_base = OTHER; note = 2'-fluoroadenosine
  modified_base 8: mod_base = OTHER; note = 2'-O-methyladenosine
  modified_base 9: mod_base = cm
  modified_base 10: mod_base = OTHER; note = 2'-O-methyladenosine
  modified_base 11: mod_base = cm
  modified_base 12: mod_base = cm
  modified_base 13: mod_base = um
  modified_base 14: mod_base = OTHER; note = 2'-fluoroadenosine
  modified_base 15: mod_base = gm
  modified_base 16: mod_base = OTHER; note = 2'-fluorocytidine
  modified_base 17: mod_base = OTHER; note = 2'-O-methyladenosine
  modified_base 18: mod_base = um
  modified_base 19: mod_base = cm
  modified_base 20: mod_base = um
  modified_base 21: mod_base = OTHER; note = 2'-O-methylguanosine with a 3'-phosphorothioate linkage
  modified_base 22: mod_base = OTHER; note = 2'-O-methylcytidine with a 3'-phosphorothioate linkage
  modified_base 23: mod_base = OTHER; note = 2'-O-methyladenosine
tccttgaacacctagcatctgca

SEQ ID NO: 1306 - RNA, 21 nt, synthetic construct
  source 1..21: mol_type = other RNA
  modified_base 1: mod_base = OTHER; note = 2'-O-methyladenosine with a 3'-phosphorothioate linkage
  modified_base 2: mod_base = OTHER; note = 2'-O-methylguanosine with a 3'-phosphorothioate linkage
  modified_base 3: mod_base = OTHER; note = 2'-O-methyladenosine
  modified_base 4: mod_base = um
  modified_base 5: mod_base = gm
  modified_base 6: mod_base = cm
  modified_base 7: mod_base = um
  modified_base 8: mod_base = OTHER; note = 2'-O-methyladenosine
  modified_base 9: mod_base = OTHER; note = 2'-fluoroguanosine
  modified_base 10: mod_base = OTHER; note = 2'-fluoroguanosine
  modified_base 11: mod_base = OTHER; note = 2'-fluorouridine
  modified_base 12: mod_base = gm
  modified_base 13: mod_base = um
  modified_base 14: mod_base = um
  modified_base 15: mod_base = cm
  modified_base 16: mod_base = OTHER; note = 2'-O-methyladenosine
  modified_base 17: mod_base = OTHER; note = 2'-O-methyladenosine
  modified_base 18: mod_base = gm
  modified_base 19: mod_base = OTHER; note = 2'-O-methylguanosine with a 3'-phosphorothioate linkage
  modified_base 20: mod_base = OTHER; note = 2'-O-methyladenosine with a 3'-phosphorothioate linkage
  modified_base 21: mod_base = OTHER; note = 2'-O-methyladenosine
agatgctaggtgttcaaggaa

SEQ ID NO: 1307 - RNA, 23 nt, synthetic construct
  source 1..23: mol_type = other RNA
  modified_base 1: mod_base = OTHER; note = 2'-O-methyluridine with a 3'-phosphorothioate linkage and a 5'-phosphate substitution
  modified_base 2: mod_base = OTHER; note = 2'-fluorouridine with a 3'-phosphorothioate linkage
  modified_base 3: mod_base = cm
  modified_base 4: mod_base = cm
  modified_base 5: mod_base = OTHER; note = 2'-fluorouridine
  modified_base 6: mod_base = um
  modified_base 7: mod_base = OTHER; note = 2'-fluoroguanosine
  modified_base 8: mod_base = OTHER; note = 2'-O-methyladenosine
  modified_base 9: mod_base = OTHER; note = 2'-O-methyladenosine
  modified_base 10: mod_base = cm
  modified_base 11: mod_base = OTHER; note = 2'-O-methyladenosine
  modified_base 12: mod_base = cm
  modified_base 13: mod_base = cm
  modified_base 14: mod_base = OTHER; note = 2'-fluorouridine
  modified_base 15: mod_base = OTHER; note = 2'-O-methyladenosine
  modified_base 16: mod_base = OTHER; note = 2'-fluoroguanosine
  modified_base 17: mod_base = cm
  modified_base 18: mod_base = OTHER; note = 2'-O-methyladenosine
  modified_base 19: mod_base = um
  modified_base 20: mod_base = cm
  modified_base 21: mod_base = OTHER; note = 2'-O-methyluridine with a 3'-phosphorothioate linkage
  modified_base 22: mod_base = OTHER; note = 2'-O-methylguanosine with a 3'-phosphorothioate linkage
  modified_base 23: mod_base = cm
ttccttgaacacctagcatctgc

SEQ ID NO: 1308 - RNA, 21 nt, synthetic construct
  source 1..21: mol_type = other RNA
  modified_base 1: mod_base = OTHER; note = 2'-O-methylguanosine with a 3'-phosphorothioate linkage
  modified_base 2: mod_base = OTHER; note = 2'-O-methylcytidine with a 3'-phosphorothioate linkage
  modified_base 3: mod_base = um
  modified_base 4: mod_base = OTHER; note = 2'-O-methyladenosine
  modified_base 5: mod_base = gm
  modified_base 6: mod_base = gm
  modified_base 7: mod_base = um
  modified_base 8: mod_base = gm
  modified_base 9: mod_base = OTHER; note = 2'-fluorouridine
  modified_base 10: mod_base = OTHER; note = 2'-fluorouridine
  modified_base 11: mod_base = OTHER; note = 2'-fluorocytidine
  modified_base 12: mod_base = OTHER; note = 2'-O-methyladenosine
  modified_base 13: mod_base = OTHER; note = 2'-O-methyladenosine
  modified_base 14: mod_base = gm
  modified_base 15: mod_base = gm
  modified_base 16: mod_base = OTHER; note = 2'-O-methyladenosine
  modified_base 17: mod_base = gm
  modified_base 18: mod_base = cm
  modified_base 19: mod_base = OTHER; note = 2'-O-methyladenosine with a 3'-phosphorothioate linkage
  modified_base 20: mod_base = OTHER; note = 2'-O-methyluridine with a 3'-phosphorothioate linkage
  modified_base 21: mod_base = OTHER; note = 2'-O-methyladenosine
gctaggtgttcaaggagcata

SEQ ID NO: 1309 - RNA, 23 nt, synthetic construct
  source 1..23: mol_type = other RNA
  modified_base 1: mod_base = OTHER; note = 2'-O-methyluridine with a 3'-phosphorothioate linkage and a 5'-phosphate substitution
  modified_base 2: mod_base = OTHER; note = 2'-fluoroadenosine with a 3'-phosphorothioate linkage
  modified_base 3: mod_base = um
  modified_base 4: mod_base = gm
  modified_base 5: mod_base = OTHER; note = 2'-fluorocytidine
  modified_base 6: mod_base = um
  modified_base 7: mod_base = OTHER; note = 2'-fluorocytidine
  modified_base 8: mod_base = cm
  modified_base 9: mod_base = um
  modified_base 10: mod_base = um
  modified_base 11: mod_base = gm
  modified_base 12: mod_base = OTHER; note = 2'-O-methyladenosine
  modified_base 13: mod_base = OTHER; note = 2'-O-methyladenosine
  modified_base 14: mod_base = OTHER; note = 2'-fluorocytidine
  modified_base 15: mod_base = OTHER; note = 2'-O-methyladenosine
  modified_base 16: mod_base = OTHER; note = 2'-fluorocytidine
  modified_base 17: mod_base = cm
  modified_base 18: mod_base = um
  modified_base 19: mod_base = OTHER; note = 2'-O-methyladenosine
  modified_base 20: mod_base = gm
  modified_base 21: mod_base = OTHER; note = 2'-O-methylcytidine with a 3'-phosphorothioate linkage
  modified_base 22: mod_base = OTHER; note = 2'-O-methyladenosine with a 3'-phosphorothioate linkage
  modified_base 23: mod_base = um
tatgctccttgaacacctagcat

SEQ ID NO: 1310 - RNA, 21 nt, synthetic construct
  source 1..21: mol_type = other RNA
  modified_base 1: mod_base = OTHER; note = 2'-O-methyluridine with a 3'-phosphorothioate linkage
  modified_base 2: mod_base = OTHER; note = 2'-O-methyladenosine with a 3'-phosphorothioate linkage
  modified_base 3: mod_base = gm
  modified_base 4: mod_base = gm
  modified_base 5: mod_base = um
  modified_base 6: mod_base = gm
  modified_base 7: mod_base = um
  modified_base 8: mod_base = um
  modified_base 9: mod_base = OTHER; note = 2'-fluorocytidine
  modified_base 10: mod_base = OTHER; note = 2'-fluoroadenosine
  modified_base 11: mod_base = OTHER; note = 2'-fluoroadenosine
  modified_base 12: mod_base = gm
  modified_base 13: mod_base = gm
  modified_base 14: mod_base = OTHER; note = 2'-O-methyladenosine
  modified_base 15: mod_base = gm
  modified_base 16: mod_base = cm
  modified_base 17: mod_base = OTHER; note = 2'-O-methyladenosine
  modified_base 18: mod_base = um
  modified_base 19: mod_base = OTHER; note = 2'-O-methylguanosine with a 3'-phosphorothioate linkage
  modified_base 20: mod_base = OTHER; note = 2'-O-methylcytidine with a 3'-phosphorothioate linkage
  modified_base 21: mod_base = OTHER; note = 2'-O-methyladenosine
taggtgttcaaggagcatgca

SEQ ID NO: 1311 - RNA, 23 nt, synthetic construct
  source 1..23: mol_type = other RNA
  modified_base 1: mod_base = OTHER; note = 2'-O-methyluridine with a 3'-phosphorothioate linkage and a 5'-phosphate substitution
  modified_base 2: mod_base = OTHER; note = 2'-fluoroguanosine with a 3'-phosphorothioate linkage
  modified_base 3: mod_base = cm
  modified_base 4: mod_base = OTHER; note = 2'-O-methyladenosine
  modified_base 5: mod_base = OTHER; note = 2'-fluorouridine
  modified_base 6: mod_base = gm
  modified_base 7: mod_base = OTHER; note = 2'-fluorocytidine
  modified_base 8: mod_base = um
  modified_base 9: mod_base = cm
  modified_base 10: mod_base = cm
  modified_base 11: mod_base = um
  modified_base 12: mod_base = um
  modified_base 13: mod_base = gm
  modified_base 14: mod_base = OTHER; note = 2'-fluoroadenosine
  modified_base 15: mod_base = OTHER; note = 2'-O-methyladenosine
  modified_base 16: mod_base = OTHER; note = 2'-fluorocytidine
  modified_base 17: mod_base = OTHER; note = 2'-O-methyladenosine
  modified_base 18: mod_base = cm
  modified_base 19: mod_base = cm
  modified_base 20: mod_base = um
  modified_base 21: mod_base = OTHER; note = 2'-O-methyladenosine with a 3'-phosphorothioate linkage
  modified_base 22: mod_base = OTHER; note = 2'-O-methylguanosine with a 3'-phosphorothioate linkage
  modified_base 23: mod_base = cm
tgcatgctccttgaacacctagc

SEQ ID NO: 1312 - RNA, 21 nt, synthetic construct
  source 1..21: mol_type = other RNA
  modified_base 1: mod_base = OTHER; note = 2'-O-methyladenosine with a 3'-phosphorothioate linkage
  modified_base 2: mod_base = OTHER; note = 2'-O-methylguanosine with a 3'-phosphorothioate linkage
  modified_base 3: mod_base = gm
  modified_base 4: mod_base = um
  modified_base 5: mod_base = gm
  modified_base 6: mod_base = um
  modified_base 7: mod_base = um
  modified_base 8: mod_base = cm
  modified_base 9: mod_base = OTHER; note = 2'-fluoroadenosine
  modified_base 10: mod_base = OTHER; note = 2'-fluoroadenosine
  modified_base 11: mod_base = OTHER; note = 2'-fluoroguanosine
  modified_base 12: mod_base = gm
  modified_base 13: mod_base = OTHER; note = 2'-O-methyladenosine
  modified_base 14: mod_base = gm
  modified_base 15: mod_base = cm
  modified_base 16: mod_base = OTHER; note = 2'-O-methyladenosine
  modified_base 17: mod_base = um
  modified_base 18: mod_base = gm
  modified_base 19: mod_base = OTHER; note = 2'-O-methylcytidine with a 3'-phosphorothioate linkage
  modified_base 20: mod_base = OTHER; note = 2'-O-methyladenosine with a 3'-phosphorothioate linkage
  modified_base 21: mod_base = OTHER; note = 2'-O-methyladenosine
aggtgttcaaggagcatgcaa

SEQ ID NO: 1313 - RNA, 23 nt, synthetic construct
  source 1..23: mol_type = other RNA
  modified_base 1: mod_base = OTHER; note = 2'-O-methyluridine with a 3'-phosphorothioate linkage and a 5'-phosphate substitution
  modified_base 2: mod_base = OTHER; note = 2'-fluorouridine with a 3'-phosphorothioate linkage
  modified_base 3: mod_base = gm
  modified_base 4: mod_base = cm
  modified_base 5: mod_base = OTHER; note = 2'-fluoroadenosine
  modified_base 6: mod_base = um
  modified_base 7: mod_base = OTHER; note = 2'-fluoroguanosine
  modified_base 8: mod_base = cm
  modified_base 9: mod_base = um
  modified_base 10: mod_base = cm
  modified_base 11: mod_base = cm
  modified_base 12: mod_base = um
  modified_base 13: mod_base = um
  modified_base 14: mod_base = OTHER; note = 2'-fluoroguanosine
  modified_base 15: mod_base = OTHER; note = 2'-O-methyladenosine
  modified_base 16: mod_base = OTHER; note = 2'-fluoroadenosine
  modified_base 17: mod_base = cm
  modified_base 18: mod_base = OTHER; note = 2'-O-methyladenosine
  modified_base 19: mod_base = cm
  modified_base 20: mod_base = cm
  modified_base 21: mod_base = OTHER; note = 2'-O-methyluridine with a 3'-phosphorothioate linkage
  modified_base 22: mod_base = OTHER; note = 2'-O-methyladenosine with a 3'-phosphorothioate linkage
  modified_base 23: mod_base = gm
ttgcatgctccttgaacacctag

SEQ ID NO: 1314 - RNA, 21 nt, synthetic construct
  source 1..21: mol_type = other RNA
  modified_base 1: mod_base = OTHER; note = 2'-O-methylguanosine with a 3'-phosphorothioate linkage
  modified_base 2: mod_base = OTHER; note = 2'-O-methylguanosine with a 3'-phosphorothioate linkage
  modified_base 3: mod_base = um
  modified_base 4: mod_base = gm
  modified_base 5: mod_base = um
  modified_base 6: mod_base = um
  modified_base 7: mod_base = cm
  modified_base 8: mod_base = OTHER; note = 2'-O-methyladenosine
  modified_base 9: mod_base = OTHER; note = 2'-fluoroadenosine
  modified_base 10: mod_base = OTHER; note = 2'-fluoroguanosine
  modified_base 11: mod_base = OTHER; note = 2'-fluoroguanosine
  modified_base 12: mod_base = OTHER; note = 2'-O-methyladenosine
  modified_base 13: mod_base = gm
  modified_base 14: mod_base = cm
  modified_base 15: mod_base = OTHER; note = 2'-O-methyladenosine
  modified_base 16: mod_base = um
  modified_base 17: mod_base = gm
  modified_base 18: mod_base = cm
  modified_base 19: mod_base = OTHER; note = 2'-O-methyladenosine with a 3'-phosphorothioate linkage
  modified_base 20: mod_base = OTHER; note = 2'-O-methyladenosine with a 3'-phosphorothioate linkage
  modified_base 21: mod_base = OTHER; note = 2'-O-methyladenosine
ggtgttcaaggagcatgcaaa

SEQ ID NO: 1315 - RNA, 23 nt, synthetic construct
  source 1..23: mol_type = other RNA
  modified_base 1: mod_base = OTHER; note = 2'-O-methyluridine with a 3'-phosphorothioate linkage and a 5'-phosphate substitution
  modified_base 2: mod_base = OTHER; note = 2'-fluorouridine with a 3'-phosphorothioate linkage
  modified_base 3: mod_base = um
  modified_base 4: mod_base = gm
  modified_base 5: mod_base = OTHER; note = 2'-fluorocytidine
  modified_base 6: mod_base = OTHER; note = 2'-O-methyladenosine
  modified_base 7: mod_base = OTHER; note = 2'-fluorouridine
  modified_base 8: mod_base = gm
  modified_base 9: mod_base = cm
  modified_base 10: mod_base = um
  modified_base 11: mod_base = cm
  modified_base 12: mod_base = cm
  modified_base 13: mod_base = um
  modified_base 14: mod_base = OTHER; note = 2'-fluorouridine
  modified_base 15: mod_base = gm
  modified_base 16: mod_base = OTHER; note = 2'-fluoroadenosine
  modified_base 17: mod_base = OTHER; note = 2'-O-methyladenosine
  modified_base 18: mod_base = cm
  modified_base 19: mod_base = OTHER; note = 2'-O-methyladenosine
  modified_base 20: mod_base = cm
  modified_base 21: mod_base = OTHER; note = 2'-O-methylcytidine with a 3'-phosphorothioate linkage
  modified_base 22: mod_base = OTHER; note = 2'-O-methyluridine with a 3'-phosphorothioate linkage
  modified_base 23: mod_base = OTHER; note = 2'-O-methyladenosine
tttgcatgctccttgaacaccta

SEQ ID NO: 1316 - RNA, 21 nt, synthetic construct
  source 1..21: mol_type = other RNA
  modified_base 1: mod_base = OTHER; note = 2'-O-methyluridine with a 3'-phosphorothioate linkage
  modified_base 2: mod_base = OTHER; note = 2'-O-methylguanosine with a 3'-phosphorothioate linkage
  modified_base 3: mod_base = um
  modified_base 4: mod_base = um
  modified_base 5: mod_base = cm
  modified_base 6: mod_base = OTHER; note = 2'-O-methyladenosine
  modified_base 7: mod_base = OTHER; note = 2'-O-methyladenosine
  modified_base 8: mod_base = gm
  modified_base 9: mod_base = OTHER; note = 2'-fluoroguanosine
  modified_base 10: mod_base = OTHER; note = 2'-fluoroadenosine
  modified_base 11: mod_base = OTHER; note = 2'-fluoroguanosine
  modified_base 12: mod_base = cm
  modified_base 13: mod_base = OTHER; note = 2'-O-methyladenosine
  modified_base 14: mod_base = um
  modified_base 15: mod_base = gm
  modified_base 16: mod_base = cm
  modified_base 17: mod_base = OTHER; note = 2'-O-methyladenosine
  modified_base 18: mod_base = OTHER; note = 2'-O-methyladenosine
  modified_base 19: mod_base = OTHER; note = 2'-O-methyladenosine with a 3'-phosphorothioate linkage
  modified_base 20: mod_base = OTHER; note = 2'-O-methylguanosine with a 3'-phosphorothioate linkage
  modified_base 21: mod_base = OTHER; note = 2'-O-methyladenosine
tgttcaaggagcatgcaaaga

SEQ ID NO: 1317 - RNA, 23 nt, synthetic construct
  source 1..23: mol_type = other RNA
  modified_base 1: mod_base = OTHER; note = 2'-O-methyluridine with a 3'-phosphorothioate linkage and a 5'-phosphate substitution
  modified_base 2: mod_base = OTHER; note = 2'-fluorocytidine with a 3'-phosphorothioate linkage
  modified_base 3: mod_base = um
  modified_base 4: mod_base = um
  modified_base 5: mod_base = OTHER; note = 2'-fluorouridine
  modified_base 6: mod_base = gm
  modified_base 7: mod_base = OTHER; note = 2'-fluorocytidine
  modified_base 8: mod_base = OTHER; note = 2'-O-methyladenosine
  modified_base 9: mod_base = um
  modified_base 10: mod_base = gm
  modified_base 11: mod_base = cm
  modified_base 12: mod_base = um
  modified_base 13: mod_base = cm
  modified_base 14: mod_base = OTHER; note = 2'-fluorocytidine
  modified_base 15: mod_base = um
  modified_base 16: mod_base = OTHER; note = 2'-fluorouridine
  modified_base 17: mod_base = gm
  modified_base 18: mod_base = OTHER; note = 2'-O-methyladenosine
  modified_base 19: mod_base = OTHER; note = 2'-O-methyladenosine
  modified_base 20: mod_base = cm
  modified_base 21: mod_base = OTHER; note = 2'-O-methyladenosine with a 3'-phosphorothioate linkage
  modified_base 22: mod_base = OTHER; note = 2'-O-methylcytidine with a 3'-phosphorothioate linkage
  modified_base 23: mod_base = cm
tctttgcatgctccttgaacacc

SEQ ID NO: 1318 - RNA, 21 nt, synthetic construct
  source 1..21: mol_type = other RNA
  modified_base 1: mod_base = OTHER; note = 2'-O-methylguanosine with a 3'-phosphorothioate linkage
  modified_base 2: mod_base = OTHER; note = 2'-O-methyluridine with a 3'-phosphorothioate linkage
  modified_base 3: mod_base = um
  modified_base 4: mod_base = cm
  modified_base 5: mod_base = OTHER; note = 2'-O-methyladenosine
  modified_base 6: mod_base = OTHER; note = 2'-O-methyladenosine
  modified_base 7: mod_base = gm
  modified_base 8: mod_base = gm
  modified_base 9: mod_base = OTHER; note = 2'-fluoroadenosine
  modified_base 10: mod_base = OTHER; note = 2'-fluoroguanosine
  modified_base 11: mod_base = OTHER; note = 2'-fluorocytidine
  modified_base 12: mod_base = OTHER; note = 2'-O-methyladenosine
  modified_base 13: mod_base = um
  modified_base 14: mod_base = gm
  modified_base 15: mod_base = cm
  modified_base 16: mod_base = OTHER; note = 2'-O-methyladenosine
  modified_base 17: mod_base = OTHER; note = 2'-O-methyladenosine
  modified_base 18: mod_base = OTHER; note = 2'-O-methyladenosine
  modified_base 19: mod_base = OTHER; note = 2'-O-methylguanosine with a 3'-phosphorothioate linkage
  modified_base 20: mod_base = OTHER; note = 2'-O-methyladenosine with a 3'-phosphorothioate linkage
  modified_base 21: mod_base = OTHER; note = 2'-O-methyladenosine
gttcaaggagcatgcaaagaa

SEQ ID NO: 1319 - RNA, 23 nt, synthetic construct
  source 1..23: mol_type = other RNA
  modified_base 1: mod_base = OTHER; note = 2'-O-methyluridine with a 3'-phosphorothioate linkage and a 5'-phosphate substitution
  modified_base 2: mod_base = OTHER; note = 2'-fluorouridine with a 3'-phosphorothioate linkage
  modified_base 3: mod_base = cm
  modified_base 4: mod_base = um
  modified_base 5: mod_base = OTHER; note = 2'-fluorouridine
  modified_base 6: mod_base = um
  modified_base 7: mod_base = OTHER; note = 2'-fluoroguanosine
  modified_base 8: mod_base = cm
  modified_base 9: mod_base = OTHER; note = 2'-O-methyladenosine
  modified_base 10: mod_base = um
  modified_base 11: mod_base = gm
  modified_base 12: mod_base = cm
  modified_base 13: mod_base = um
  modified_base 14: mod_base = OTHER; note = 2'-fluorocytidine
  modified_base 15: mod_base = cm
  modified_base 16: mod_base = OTHER; note = 2'-fluorouridine
  modified_base 17: mod_base = um
  modified_base 18: mod_base = gm
  modified_base 19: mod_base = OTHER; note = 2'-O-methyladenosine
  modified_base 20: mod_base = OTHER; note = 2'-O-methyladenosine
  modified_base 21: mod_base = OTHER; note = 2'-O-methylcytidine with a 3'-phosphorothioate linkage
  modified_base 22: mod_base = OTHER; note = 2'-O-methyladenosine with a 3'-phosphorothioate linkage
  modified_base 23: mod_base = cm
ttctttgcatgctccttgaacac

SEQ ID NO: 1320 - RNA, 21 nt, synthetic construct
  source 1..21: mol_type = other RNA
  modified_base 1: mod_base = OTHER; note = 2'-O-methylcytidine with a 3'-phosphorothioate linkage
  modified_base 2: mod_base = OTHER; note = 2'-O-methylcytidine with a 3'-phosphorothioate linkage
  modified_base 3: mod_base = cm
  modified_base 4: mod_base = gm
  modified_base 5: mod_base = gm
  modified_base 6: mod_base = cm
  modified_base 7: mod_base = OTHER; note = 2'-O-methyladenosine
  modified_base 8: mod_base = gm
  modified_base 9: mod_base = OTHER; note = 2'-fluorocytidine
  modified_base 10: mod_base = OTHER; note = 2'-fluorouridine
  modified_base 11: mod_base = OTHER; note = 2'-fluorouridine
  modified_base 12: mod_base = gm
  modified_base 13: mod_base = cm
  modified_base 14: mod_base = cm
  modified_base 15: mod_base = cm
  modified_base 16: mod_base = gm
  modified_base 17: mod_base = OTHER; note = 2'-O-methyladenosine
  modified_base 18: mod_base = OTHER; note = 2'-O-methyladenosine
  modified_base 19: mod_base = OTHER; note = 2'-O-methyluridine with a 3'-phosphorothioate linkage
  modified_base 20: mod_base = OTHER; note = 2'-O-methyluridine with a 3'-phosphorothioate linkage
  modified_base 21: mod_base = OTHER; note = 2'-O-methyladenosine
cccggcagcttgcccgaatta

SEQ ID NO: 1321 - RNA, 23 nt, synthetic construct
  source 1..23: mol_type = other RNA
  modified_base 1: mod_base = OTHER; note = 2'-O-methyluridine with a 3'-phosphorothioate linkage and a 5'-phosphate substitution
  modified_base 2: mod_base = OTHER; note = 2'-fluoroadenosine with a 3'-phosphorothioate linkage
  modified_base 3: mod_base = OTHER; note = 2'-O-methyladenosine
  modified_base 4: mod_base = um
  modified_base 5: mod_base = OTHER; note = 2'-fluorouridine
  modified_base 6: mod_base = cm
  modified_base 7: mod_base = OTHER; note = 2'-fluoroguanosine
  modified_base 8: mod_base = gm
  modified_base 9: mod_base = gm
  modified_base 10: mod_base = cm
  modified_base 11: mod_base = OTHER; note = 2'-O-methyladenosine
  modified_base 12: mod_base = OTHER; note = 2'-O-methyladenosine
  modified_base 13: mod_base = gm
  modified_base 14: mod_base = OTHER; note = 2'-fluorocytidine
  modified_base 15: mod_base = um
  modified_base 16: mod_base = OTHER; note = 2'-fluoroguanosine
  modified_base 17: mod_base = cm
  modified_base 18: mod_base = cm
  modified_base 19: mod_base = gm
  modified_base 20: mod_base = gm
  modified_base 21: mod_base = OTHER; note = 2'-O-methylguanosine with a 3'-phosphorothioate linkage
  modified_base 22: mod_base = OTHER; note = 2'-O-methylcytidine with a 3'-phosphorothioate linkage
  modified_base 23: mod_base = OTHER; note = 2'-O-methyladenosine
taattcgggcaagctgccgggca

SEQ ID NO: 1322 - RNA, 21 nt, synthetic construct
  source 1..21: mol_type = other RNA
  modified_base 1: mod_base = OTHER; note = 2'-O-methylcytidine with a 3'-phosphorothioate linkage
  modified_base 2: mod_base = OTHER; note = 2'-O-methylguanosine with a 3'-phosphorothioate linkage
  modified_base 3: mod_base = gm
  modified_base 4: mod_base = cm
  modified_base 5: mod_base = OTHER; note = 2'-O-methyladenosine
  modified_base 6: mod_base = gm
  modified_base 7: mod_base = cm
  modified_base 8: mod_base = um
  modified_base 9: mod_base = OTHER; note = 2'-fluorouridine
  modified_base 10: mod_base = OTHER; note = 2'-fluoroguanosine
  modified_base 11: mod_base = OTHER; note = 2'-fluorocytidine
  modified_base 12: mod_base = cm
  modified_base 13: mod_base = cm
  modified_base 14: mod_base = gm
  modified_base 15: mod_base = OTHER; note = 2'-O-methyladenosine
  modified_base 16: mod_base = OTHER; note = 2'-O-methyladenosine
  modified_base 17: mod_base = um
  modified_base 18: mod_base = um
  modified_base 19: mod_base = OTHER; note = 2'-O-methylguanosine with a 3'-phosphorothioate linkage
  modified_base 20: mod_base = OTHER; note = 2'-O-methyluridine with a 3'-phosphorothioate linkage
  modified_base 21: mod_base = OTHER; note = 2'-O-methyladenosine
cggcagcttgcccgaattgta

SEQ ID NO: 1323 - RNA, 23 nt, synthetic construct
  source 1..23: mol_type = other RNA
  modified_base 1: mod_base = OTHER; note = 2'-O-methyluridine with a 3'-phosphorothioate linkage and a 5'-phosphate substitution
  modified_base 2: mod_base = OTHER; note = 2'-fluoroadenosine with a 3'-phosphorothioate linkage
  modified_base 3: mod_base = cm
  modified_base 4: mod_base = OTHER; note = 2'-O-methyladenosine
  modified_base 5: mod_base = OTHER; note = 2'-fluoroadenosine
  modified_base 6: mod_base = um
  modified_base 7: mod_base = OTHER; note = 2'-fluorouridine
  modified_base 8: mod_base = cm
  modified_base 9: mod_base = gm
  modified_base 10: mod_base = gm
  modified_base 11: mod_base = gm
  modified_base 12: mod_base = cm
  modified_base 13: mod_base = OTHER; note = 2'-O-methyladenosine
  modified_base 14: mod_base = OTHER; note = 2'-fluoroadenosine
  modified_base 15: mod_base = gm
  modified_base 16: mod_base = OTHER; note = 2'-fluorocytidine
  modified_base 17: mod_base = um
  modified_base 18: mod_base = gm
  modified_base 19: mod_base = cm
  modified_base 20: mod_base = cm
  modified_base 21: mod_base = OTHER; note = 2'-O-methylguanosine with a 3'-phosphorothioate linkage
  modified_base 22: mod_base = OTHER; note = 2'-O-methylguanosine with a 3'-phosphorothioate linkage
  modified_base 23: mod_base = gm
tacaattcgggcaagctgccggg

SEQ ID NO: 1324 - RNA, 21 nt, synthetic construct
  source 1..21: mol_type = other RNA
  modified_base 1: mod_base = OTHER; note = 2'-O-methylcytidine with a 3'-phosphorothioate linkage
  modified_base 2: mod_base = OTHER; note = 2'-O-methyladenosine with a 3'-phosphorothioate linkage
  modified_base 3: mod_base = um
  modified_base 4: mod_base = um
  modified_base 5: mod_base = gm
  modified_base 6: mod_base = gm
  modified_base 7: mod_base = cm
  modified_base 8: mod_base = OTHER; note = 2'-O-methyladenosine
  modified_base 9: mod_base = OTHER; note = 2'-fluoroguanosine
  modified_base 10: mod_base = OTHER; note = 2'-fluorocytidine
  modified_base 11: mod_base = OTHER; note = 2'-fluoroadenosine
  modified_base 12: mod_base = gm
  modified_base 13: mod_base = gm
  modified_base 14: mod_base = OTHER; note = 2'-O-methyladenosine
  modified_base 15: mod_base = cm
  modified_base 16: mod_base = OTHER; note = 2'-O-methyladenosine
  modified_base 17: mod_base = um
  modified_base 18: mod_base = cm
  modified_base 19: mod_base = OTHER; note = 2'-O-methyluridine with a 3'-phosphorothioate linkage
  modified_base 20: mod_base = OTHER; note = 2'-O-methyluridine with a 3'-phosphorothioate linkage
  modified_base 21: mod_base = OTHER; note = 2'-O-methyladenosine
cattggcagcaggacatctta

SEQ ID NO: 1325 - RNA, 23 nt, synthetic construct
  source 1..23: mol_type = other RNA
  modified_base 1: mod_base = OTHER; note = 2'-O-methyluridine with a 3'-phosphorothioate linkage and a 5'-phosphate substitution
  modified_base 2: mod_base = OTHER; note = 2'-fluoroadenosine with a 3'-phosphorothioate linkage
  modified_base 3: mod_base = OTHER; note = 2'-O-methyladenosine
  modified_base 4: mod_base = gm
  modified_base 5: mod_base = OTHER; note = 2'-fluoroadenosine
  modified_base 6: mod_base = um
  modified_base 7: mod_base = OTHER; note = 2'-fluoroguanosine
  modified_base 8: mod_base = um
  modified_base 9: mod_base = cm
  modified_base 10: mod_base = cm
  modified_base 11: mod_base = um
  modified_base 12: mod_base = gm
  modified_base 13: mod_base = cm
  modified_base 14: mod_base = OTHER; note = 2'-fluorouridine
  modified_base 15: mod_base = gm
  modified_base 16: mod_base = OTHER; note = 2'-fluorocytidine
  modified_base 17: mod_base = cm
  modified_base 18: mod_base = OTHER; note = 2'-O-methyladenosine
  modified_base 19: mod_base = OTHER; note = 2'-O-methyladenosine
  modified_base 20: mod_base = um
  modified_base 21: mod_base = OTHER; note = 2'-O-methylguanosine with a 3'-phosphorothioate linkage
  modified_base 22: mod_base = OTHER; note = 2'-O-methylcytidine with a 3'-phosphorothioate linkage
  modified_base 23: mod_base = um
taagatgtcctgctgccaatgct

SEQ ID NO: 1326 - RNA, 21 nt, synthetic construct
  source 1..21: mol_type = other RNA
  modified_base 1: mod_base = OTHER; note = 2'-O-methyladenosine with a 3'-phosphorothioate linkage
  modified_base 2: mod_base = OTHER; note = 2'-O-methyluridine with a 3'-phosphorothioate linkage
  modified_base 3: mod_base = um
  modified_base 4: mod_base = gm
  modified_base 5: mod_base = gm
  modified_base 6: mod_base = cm
  modified_base 7: mod_base = OTHER; note = 2'-O-methyladenosine
  modified_base 8: mod_base = gm
  modified_base 9: mod_base = OTHER; note = 2'-fluorocytidine
  modified_base 10: mod_base = OTHER; note = 2'-fluoroadenosine
  modified_base 11: mod_base = OTHER; note = 2'-fluoroguanosine
  modified_base 12: mod_base = gm
  modified_base 13: mod_base = OTHER; note = 2'-O-methyladenosine
  modified_base 14: mod_base = cm
  modified_base 15: mod_base = OTHER; note = 2'-O-methyladenosine
  modified_base 16: mod_base = um
  modified_base 17: mod_base = cm
  modified_base 18: mod_base = um
  modified_base 19: mod_base = OTHER; note = 2'-O-methyluridine with a 3'-phosphorothioate linkage
  modified_base 20: mod_base = OTHER; note = 2'-O-methylguanosine with a 3'-phosphorothioate linkage
  modified_base 21: mod_base = OTHER; note = 2'-O-methyladenosine
attggcagcaggacatcttga

SEQ ID NO: 1327 - RNA, 23 nt, synthetic construct
  source 1..23: mol_type = other RNA
  modified_base 1: mod_base = OTHER; note = 2'-O-methyluridine with a 3'-phosphorothioate linkage and a 5'-phosphate substitution
  modified_base 2: mod_base = OTHER; note = 2'-fluorocytidine with a 3'-phosphorothioate linkage
  modified_base 3: mod_base = OTHER; note = 2'-O-methyladenosine
  modified_base 4: mod_base = OTHER; note = 2'-O-methyladenosine
  modified_base 5: mod_base = OTHER; note = 2'-fluoroguanosine
  modified_base 6: mod_base = OTHER; note = 2'-O-methyladenosine
  modified_base 7: mod_base = OTHER; note = 2'-fluorouridine
  modified_base 8: mod_base = gm
  modified_base 9: mod_base = um
  modified_base 10: mod_base = cm
  modified_base 11: mod_base = cm
  modified_base 12: mod_base = um
  modified_base 13: mod_base = gm
  modified_base 14: mod_base = OTHER; note = 2'-fluorocytidine
  modified_base 15: mod_base = um
  modified_base 16: mod_base = OTHER; note = 2'-fluoroguanosine
  modified_base 17: mod_base = cm
  modified_base 18: mod_base = cm
  modified_base 19: mod_base = OTHER; note = 2'-O-methyladenosine
  modified_base 20: mod_base = OTHER; note = 2'-O-methyladenosine
  modified_base 21: mod_base = OTHER; note = 2'-O-methyluridine with a 3'-phosphorothioate linkage
  modified_base 22: mod_base = OTHER; note = 2'-O-methylguanosine with a 3'-phosphorothioate linkage
  modified_base 23: mod_base = cm
tcaagatgtcctgctgccaatgc

SEQ ID NO: 1328 - RNA, 21 nt, synthetic construct
  source 1..21: mol_type = other RNA
  modified_base 1: mod_base = OTHER; note = 2'-O-methyluridine with a 3'-phosphorothioate linkage
  modified_base 2: mod_base = OTHER; note = 2'-O-methylguanosine with a 3'-phosphorothioate linkage
  modified_base 3: mod_base = gm
  modified_base 4: mod_base = cm
  modified_base 5: mod_base = OTHER; note = 2'-O-methyladenosine
  modified_base 6: mod_base = gm
  modified_base 7: mod_base = cm
  modified_base 8: mod_base = OTHER; note = 2'-O-methyladenosine
  modified_base 9: mod_base = OTHER; note = 2'-fluoroguanosine
  modified_base 10: mod_base = OTHER; note = 2'-fluoroguanosine
  modified_base 11: mod_base = OTHER; note = 2'-fluoroadenosine
  modified_base 12: mod_base = cm
  modified_base 13: mod_base = OTHER; note = 2'-O-methyladenosine
  modified_base 14: mod_base = um
  modified_base 15: mod_base = cm
  modified_base 16: mod_base = um
  modified_base 17: mod_base = um
  modified_base 18: mod_base = gm
  modified_base 19: mod_base = OTHER; note = 2'-O-methyluridine with a 3'-phosphorothioate linkage
  modified_base 20: mod_base = OTHER; note = 2'-O-methylcytidine with a 3'-phosphorothioate linkage
  modified_base 21: mod_base = OTHER; note = 2'-O-methyladenosine
tggcagcaggacatcttgtca

SEQ ID NO: 1329 - RNA, 23 nt, synthetic construct
  source 1..23: mol_type = other RNA
  modified_base 1: mod_base = OTHER; note = 2'-O-methyluridine with a 3'-phosphorothioate linkage and a 5'-phosphate substitution
  modified_base 2: mod_base = OTHER; note = 2'-fluoroguanosine with a 3'-phosphorothioate linkage
  modified_base 3: mod_base = OTHER; note = 2'-O-methyladenosine
  modified_base 4: mod_base = cm
  modified_base 5: mod_base = OTHER; note = 2'-fluoroadenosine
  modified_base 6: mod_base = OTHER; note = 2'-O-methyladenosine
  modified_base 7: mod_base = OTHER; note = 2'-fluoroguanosine
  modified_base 8: mod_base = OTHER; note = 2'-O-methyladenosine
  modified_base 9: mod_base = um
  modified_base 10: mod_base = gm
  modified_base 11: mod_base = um
  modified_base 12: mod_base = cm
  modified_base 13: mod_base = cm
  modified_base 14: mod_base = OTHER; note = 2'-fluorouridine
  modified_base 15: mod_base = gm
  modified_base 16: mod_base = OTHER; note = 2'-fluorocytidine
  modified_base 17: mod_base = um
  modified_base 18: mod_base = gm
  modified_base 19: mod_base = cm
  modified_base 20: mod_base = cm
  modified_base 21: mod_base = OTHER; note = 2'-O-methyladenosine with a 3'-phosphorothioate linkage
  modified_base 22: mod_base = OTHER; note = 2'-O-methyladenosine with a 3'-phosphorothioate linkage
  modified_base 23: mod_base = um
tgacaagatgtcctgctgccaat

SEQ ID NO: 1330 - RNA, 21 nt, synthetic construct
  source 1..21: mol_type = other RNA
  modified_base 1: mod_base = OTHER; note = 2'-O-methyluridine with a 3'-phosphorothioate linkage
  modified_base 2: mod_base = OTHER; note = 2'-O-methyladenosine with a 3'-phosphorothioate linkage
  modified_base 3: mod_base = um
  modified_base 4: mod_base = um
  modified_base 5: mod_base = um
  modified_base 6: mod_base = gm
  modified_base 7: mod_base = um
  modified_base 8: mod_base = um
  modified_base 9: mod_base = OTHER; note = 2'-fluorocytidine
  modified_base 10: mod_base = OTHER; note = 2'-fluoroadenosine
  modified_base 11: mod_base = OTHER; note = 2'-fluoroguanosine
  modified_base 12: mod_base = OTHER; note = 2'-O-methyladenosine
  modified_base 13: mod_base = gm
  modified_base 14: mod_base = OTHER; note = 2'-O-methyladenosine
  modified_base 15: mod_base = gm
  modified_base 16: mod_base = gm
  modified_base 17: mod_base = cm
  modified_base 18: mod_base = cm
  modified_base 19: mod_base = OTHER; note = 2'-O-methyluridine with a 3'-phosphorothioate linkage
  modified_base 20: mod_base = OTHER; note = 2'-O-methyluridine with a 3'-phosphorothioate linkage
  modified_base 21: mod_base = OTHER; note = 2'-O-methyladenosine
tatttgttcagagaggcctta

SEQ ID NO: 1331 - RNA, 23 nt, synthetic construct
  source 1..23: mol_type = other RNA
  modified_base 1: mod_base = OTHER; note = 2'-O-methyluridine with a 3'-phosphorothioate linkage and a 5'-phosphate substitution
  modified_base 2: mod_base = OTHER; note = 2'-fluoroadenosine with a 3'-phosphorothioate linkage
  modified_base 3: mod_base = OTHER; note = 2'-O-methyladenosine
  modified_base 4: mod_base = gm
  modified_base 5: mod_base = OTHER; note = 2'-fluoroguanosine
  modified_base 6: mod_base = cm
  modified_base 7: mod_base = OTHER; note = 2'-fluorocytidine
  modified_base 8: mod_base = um
  modified_base 9: mod_base = cm
  modified_base 10: mod_base = um
  modified_base 11: mod_base = cm
  modified_base 12: mod_base = um
  modified_base 13: mod_base = gm
  modified_base 14: mod_base = OTHER; note = 2'-fluoroadenosine
  modified_base 15: mod_base = OTHER; note = 2'-O-methyladenosine
  modified_base 16: mod_base = OTHER; note = 2'-fluorocytidine
  modified_base 17: mod_base = OTHER; note = 2'-O-methyladenosine
  modified_base 18: mod_base = OTHER; note = 2'-O-methyladenosine
  modified_base 19: mod_base = OTHER; note = 2'-O-methyladenosine
  modified_base 20: mod_base = um
  modified_base 21: mod_base = OTHER; note = 2'-O-methyladenosine with a 3'-phosphorothioate linkage
  modified_base 22: mod_base = OTHER; note = 2'-O-methylguanosine with a 3'-phosphorothioate linkage
  modified_base 23: mod_base = cm
taaggcctctctgaacaaatagc

SEQ ID NO: 1332 - RNA, 21 nt, synthetic construct
  source 1..21: mol_type = other RNA
  modified_base 1: mod_base = OTHER; note = 2'-O-methyluridine with a 3'-phosphorothioate linkage
  modified_base 2: mod_base = OTHER; note = 2'-O-methyluridine with a 3'-phosphorothioate linkage
  modified_base 3: mod_base = OTHER; note = 2'-O-methyladenosine
  modified_base 4: mod_base = cm
  modified_base 5: mod_base = um
  modified_base 6: mod_base = OTHER; note = 2'-O-methyladenosine
  modified_base 7: mod_base = OTHER; note = 2'-O-methyladenosine
  modified_base 8: mod_base = OTHER; note = 2'-O-methyladenosine
  modified_base 9: mod_base = OTHER; note = 2'-fluoroguanosine
  modified_base 10: mod_base = OTHER; note = 2'-fluoroadenosine
  modified_base 11: mod_base = OTHER; note = 2'-fluorouridine
  modified_base 12: mod_base = OTHER; note = 2'-O-methyladenosine
  modified_base 13: mod_base = um
  modified_base 14: mod_base = cm
  modified_base 15: mod_base = OTHER; note = 2'-O-methyladenosine
  modified_base 16: mod_base = gm
  modified_base 17: mod_base = OTHER; note = 2'-O-methyladenosine
  modified_base 18: mod_base = gm
  modified_base 19: mod_base = OTHER; note = 2'-O-methylcytidine with a 3'-phosphorothioate linkage
  modified_base 20: mod_base = OTHER; note = 2'-O-methyluridine with a 3'-phosphorothioate linkage
  modified_base 21: mod_base = OTHER; note = 2'-O-methyladenosine
ttactaaagatatcagagcta

SEQ ID NO: 1333 - RNA, 23 nt, synthetic construct
  source 1..23: mol_type = other RNA
  modified_base 1: mod_base = OTHER; note = 2'-O-methyluridine with a 3'-phosphorothioate linkage and a 5'-phosphate substitution
  modified_base 2: mod_base = OTHER; note = 2'-fluoroadenosine with a 3'-phosphorothioate linkage
  modified_base 3: mod_base = gm
  modified_base 4: mod_base = cm
  modified_base 5: mod_base = OTHER; note = 2'-fluorouridine
  modified_base 6: mod_base = cm
  modified_base 7: mod_base = OTHER; note = 2'-fluorouridine
  modified_base 8: mod_base = gm
  modified_base 9: mod_base = OTHER; note = 2'-O-methyladenosine
  modified_base 10: mod_base = um
  modified_base 11: mod_base = OTHER; note = 2'-O-methyladenosine
  modified_base 12: mod_base = um
  modified_base 13: mod_base = cm
  modified_base 14: mod_base = OTHER; note = 2'-fluorouridine
  modified_base 15: mod_base = um
  modified_base 16: mod_base = OTHER; note = 2'-fluorouridine
  modified_base 17: mod_base = OTHER; note = 2'-O-methyladenosine
  modified_base 18: mod_base = gm
  modified_base 19: mod_base = um
  modified_base 20: mod_base = OTHER; note = 2'-O-methyladenosine
  modified_base 21: mod_base = OTHER; note = 2'-O-methyladenosine with a 3'-phosphorothioate linkage
  modified_base 22: mod_base = OTHER; note = 2'-O-methyladenosine with a 3'-phosphorothioate linkage
  modified_base 23: mod_base = gm
tagctctgatatctttagtaaag

SEQ ID NO: 1334 - RNA, 21 nt, synthetic construct
  source 1..21: mol_type = other RNA
  modified_base 1: mod_base = OTHER; note = 2'-O-methylcytidine with a 3'-phosphorothioate linkage
  modified_base 2: mod_base = OTHER; note = 2'-O-methyladenosine with a 3'-phosphorothioate linkage
  modified_base 3: mod_base = OTHER; note = 2'-O-methyladenosine
  modified_base 4: mod_base = OTHER; note = 2'-O-methyladenosine
  modified_base 5: mod_base = um
  modified_base 6: mod_base = cm
  modified_base 7: mod_base = um
  modified_base 8: mod_base = gm
  modified_base 9: mod_base = OTHER; note = 2'-fluorouridine
  modified_base 10: mod_base = OTHER; note = 2'-fluoroadenosine
  modified_base 11: mod_base = OTHER; note = 2'-fluorouridine
  modified_base 12: mod_base = OTHER; note = 2'-O-methyladenosine
  modified_base 13: mod_base = um
  modified_base 14: mod_base = gm
  modified_base 15: mod_base = um
  modified_base 16: mod_base = um
  modified_base 17: mod_base = gm
  modified_base 18: mod_base = um
  modified_base 19: mod_base = OTHER; note = 2'-O-methyladenosine with a 3'-phosphorothioate linkage
  modified_base 20: mod_base = OTHER; note = 2'-O-methyladenosine with a 3'-phosphorothioate linkage
  modified_base 21: mod_base = OTHER; note = 2'-O-methyladenosine
caaatctgtatatgttgtaaa

SEQ ID NO: 1335 - RNA, 23 nt, synthetic construct
  source 1..23: mol_type = other RNA
  modified_base 1: mod_base = OTHER; note = 2'-O-methyluridine with a 3'-phosphorothioate linkage and a 5'-phosphate substitution
  modified_base 2: mod_base = OTHER; note = 2'-fluorouridine with a 3'-phosphorothioate linkage
  modified_base 3: mod_base = um
  modified_base 4: mod_base = OTHER; note = 2'-O-methyladenosine
  modified_base 5: mod_base = OTHER; note = 2'-fluorocytidine
  modified_base 6: mod_base = OTHER; note = 2'-O-methyladenosine
  modified_base 7: mod_base = OTHER; note = 2'-fluoroadenosine
  modified_base 8: mod_base = cm
  modified_base 9: mod_base = OTHER; note = 2'-O-methyladenosine
  modified_base 10: mod_base = um
  modified_base 11: mod_base = OTHER; note = 2'-O-methyladenosine
  modified_base 12: mod_base = um
  modified_base 13: mod_base = OTHER; note = 2'-O-methyladenosine
  modified_base 14: mod_base = OTHER; note = 2'-fluorocytidine
  modified_base 15: mod_base = OTHER; note = 2'-O-methyladenosine
  modified_base 16: mod_base = OTHER; note = 2'-fluoroguanosine
  modified_base 17: mod_base = OTHER; note = 2'-O-methyladenosine
  modified_base 18: mod_base = um
  modified_base 19: mod_base = um
  modified_base 20: mod_base = um
  modified_base 21: mod_base = OTHER; note = 2'-O-methylguanosine with a 3'-phosphorothioate linkage
  modified_base 22: mod_base = OTHER; note = 2'-O-methyladenosine with a 3'-phosphorothioate linkage
  modified_base 23: mod_base = um
tttacaacatatacagatttgat

SEQ ID NO: 1336 - RNA, 21 nt, synthetic construct
  source 1..21: mol_type = other RNA
  modified_base 1: mod_base = OTHER; note = 2'-O-methyladenosine with a 3'-phosphorothioate linkage
  modified_base 2: mod_base = OTHER; note = 2'-O-methyladenosine with a 3'-phosphorothioate linkage
  modified_base 3: mod_base = OTHER; note = 2'-O-methyladenosine
  modified_base 4: mod_base = um
  modified_base 5: mod_base = cm
  modified_base 6: mod_base = um
  modified_base 7: mod_base = gm
  modified_base 8: mod_base = um
  modified_base 9: mod_base = OTHER; note = 2'-fluoroadenosine
  modified_base 10: mod_base = OTHER; note = 2'-fluorouridine
  modified_base 11: mod_base = OTHER; note = 2'-fluoroadenosine
  modified_base 12: mod_base = um
  modified_base 13: mod_base = gm
  modified_base 14: mod_base = um
  modified_base 15: mod_base = um
  modified_base 16: mod_base = gm
  modified_base 17: mod_base = um
  modified_base 18: mod_base = OTHER; note = 2'-O-methyladenosine
  modified_base 19: mod_base = OTHER; note = 2'-O-methyladenosine with a 3'-phosphorothioate linkage
  modified_base 20: mod_base = OTHER; note = 2'-O-methyluridine with a 3'-phosphorothioate linkage
  modified_base 21: mod_base = OTHER; note = 2'-O-methyladenosine
aaatctgtatatgttgtaata

SEQ ID NO: 1337 - RNA, 23 nt, synthetic construct
  source 1..23: mol_type = other RNA
  modified_base 1: mod_base = OTHER; note = 2'-O-methyluridine with a 3'-phosphorothioate linkage and a 5'-phosphate substitution
  modified_base 2: mod_base = OTHER; note = 2'-fluoroadenosine with a 3'-phosphorothioate linkage
  modified_base 3: mod_base = um
  modified_base 4: mod_base = um
  modified_base 5: mod_base = OTHER; note = 2'-fluoroadenosine
  modified_base 6: mod_base = cm
  modified_base 7: mod_base = OTHER; note = 2'-fluoroadenosine
  modified_base 8: mod_base = OTHER; note = 2'-O-methyladenosine
  modified_base 9: mod_base = cm
  modified_base 10: mod_base = OTHER; note = 2'-O-methyladenosine
  modified_base 11: mod_base = um
  modified_base 12: mod_base = OTHER; note = 2'-O-methyladenosine
  modified_base 13: mod_base = um
  modified_base 14: mod_base = OTHER; note = 2'-fluoroadenosine
  modified_base 15: mod_base = cm
  modified_base 16: mod_base = OTHER; note = 2'-fluoroadenosine
  modified_base 17: mod_base = gm
  modified_base 18: mod_base = OTHER; note = 2'-O-methyladenosine
  modified_base 19: mod_base = um
  modified_base 20: mod_base = um
  modified_base 21: mod_base = OTHER; note = 2'-O-methyluridine with a 3'-phosphorothioate linkage
  modified_base 22: mod_base = OTHER; note = 2'-O-methylguanosine with a 3'-phosphorothioate linkage
  modified_base 23: mod_base = OTHER; note = 2'-O-methyladenosine
tattacaacatatacagatttga

SEQ ID NO: 1338 - RNA, 21 nt, synthetic construct
  source 1..21: mol_type = other RNA
  modified_base 1: mod_base = OTHER; note = 2'-O-methylguanosine with a 3'-phosphorothioate linkage
  modified_base 2: mod_base = OTHER; note = 2'-O-methyluridine with a 3'-phosphorothioate linkage
  modified_base 3: mod_base = OTHER; note = 2'-O-methyladenosine
  modified_base 4: mod_base = cm
  modified_base 5: mod_base = um
  modified_base 6: mod_base = gm
  modified_base 7: mod_base = OTHER; note = 2'-O-methyladenosine
  modified_base 8: mod_base = um
  modified_base 9: mod_base = OTHER; note = 2'-fluoroadenosine
  modified_base 10: mod_base = OTHER; note = 2'-fluoroadenosine
  modified_base 11: mod_base = OTHER; note = 2'-fluoroadenosine
  modified_base 12: mod_base = OTHER; note = 2'-O-methyladenosine
  modified_base 13: mod_base = um
  modified_base 14: mod_base = OTHER; note = 2'-O-methyladenosine
  modified_base 15: mod_base = cm
  modified_base 16: mod_base = um
  modified_base 17: mod_base = cm
  modified_base 18: mod_base = um
  modified_base 19: mod_base = OTHER; note = 2'-O-methyladenosine with a 3'-phosphorothioate linkage
  modified_base 20: mod_base = OTHER; note = 2'-O-methylguanosine with a 3'-phosphorothioate linkage
  modified_base 21: mod_base = OTHER; note = 2'-O-methyladenosine
gtactgataaaatactctaga

SEQ ID NO: 1339 - RNA, 23 nt, synthetic construct
  source 1..23: mol_type = other RNA
  modified_base 1: mod_base = OTHER; note = 2'-O-methyluridine with a 3'-phosphorothioate linkage and a 5'-phosphate substitution
  modified_base 2: mod_base = OTHER; note = 2'-fluorocytidine with a 3'-phosphorothioate linkage
  modified_base 3: mod_base = um
  modified_base 4: mod_base = OTHER; note = 2'-O-methyladenosine
  modified_base 5: mod_base = OTHER; note = 2'-fluoroguanosine
  modified_base 6: mod_base = OTHER; note = 2'-O-methyladenosine
  modified_base 7: mod_base = OTHER; note = 2'-fluoroguanosine
  modified_base 8: mod_base = um
  modified_base 9: mod_base = OTHER; note = 2'-O-methyladenosine
  modified_base 10: mod_base = um
  modified_base 11: mod_base = um
  modified_base 12: mod_base = um
  modified_base 13: mod_base = um
  modified_base 14: mod_base = OTHER; note = 2'-fluoroadenosine
  modified_base 15: mod_base = um
  modified_base 16: mod_base = OTHER; note = 2'-fluorocytidine
  modified_base 17: mod_base = OTHER; note = 2'-O-methyladenosine
  modified_base 18: mod_base = gm
  modified_base 19: mod_base = um
  modified_base 20: mod_base = OTHER; note = 2'-O-methyladenosine
  modified_base 21: mod_base = OTHER; note = 2'-O-methylcytidine with a 3'-phosphorothioate linkage
  modified_base 22: mod_base = OTHER; note = 2'-O-methyladenosine with a 3'-phosphorothioate linkage
  modified_base 23: mod_base = cm
tctagagtattttatcagtacac

SEQ ID NO: 1340 - RNA, 21 nt, synthetic construct
  source 1..21: mol_type = other RNA
  modified_base 1: mod_base = OTHER; note = 2'-O-methyluridine with a 3'-phosphorothioate linkage
  modified_base 2: mod_base = OTHER; note = 2'-O-methyluridine with a 3'-phosphorothioate linkage
  modified_base 3: mod_base = gm
  modified_base 4: mod_base = um
  modified_base 5: mod_base = cm
  modified_base 6: mod_base = cm
  modified_base 7: mod_base = OTHER; note = 2'-O-methyladenosine
  modified_base 8: mod_base = gm
  modified_base 9: mod_base = OTHER; note = 2'-fluoroguanosine
  modified_base 10: mod_base = OTHER; note = 2'-fluoroadenosine
  modified_base 11: mod_base = OTHER; note = 2'-fluoroadenosine
  modified_base 12: mod_base = OTHER; note = 2'-O-methyladenosine
  modified_base 13: mod_base = cm
  modified_base 14: mod_base = cm
  modified_base 15: mod_base = cm
  modified_base 16: mod_base = um
  modified_base 17: mod_base = gm
  modified_base 18: mod_base = gm
  modified_base 19: mod_base = OTHER; note = 2'-O-methylcytidine with a 3'-phosphorothioate linkage
  modified_base 20: mod_base = OTHER; note = 2'-O-methyluridine with a 3'-phosphorothioate linkage
  modified_base 21: mod_base = OTHER; note = 2'-O-methyladenosine
ttgtccaggaaaccctggcta

SEQ ID NO: 1341 - RNA, 23 nt, synthetic construct
  source 1..23: mol_type = other RNA
  modified_base 1: mod_base = OTHER; note = 2'-O-methyluridine with a 3'-phosphorothioate linkage and a 5'-phosphate substitution
  modified_base 2: mod_base = OTHER; note = 2'-fluoroadenosine with a 3'-phosphorothioate linkage
  modified_base 3: mod_base = gm
  modified_base 4: mod_base = cm
  modified_base 5: mod_base = OTHER; note = 2'-fluorocytidine
  modified_base 6: mod_base = OTHER; note = 2'-O-methyladenosine
  modified_base 7: mod_base = OTHER; note = 2'-fluoroguanosine
  modified_base 8: mod_base = gm
  modified_base 9: mod_base = gm
  modified_base 10: mod_base = um
  modified_base 11: mod_base = um
  modified_base 12: mod_base = um
  modified_base 13: mod_base = cm
  modified_base 14: mod_base = OTHER; note = 2'-fluorocytidine
  modified_base 15: mod_base = um
  modified_base 16: mod_base = OTHER; note = 2'-fluoroguanosine
  modified_base 17: mod_base = gm
  modified_base 18: mod_base = OTHER; note = 2'-O-methyladenosine
  modified_base 19: mod_base = cm
  modified_base 20: mod_base = OTHER; note = 2'-O-methyladenosine
  modified_base 21: mod_base = OTHER; note = 2'-O-methyladenosine with a 3'-phosphorothioate linkage
  modified_base 22: mod_base = OTHER; note = 2'-O-methylcytidine with a 3'-phosphorothioate linkage
  modified_base 23: mod_base = OTHER; note = 2'-O-methyladenosine
tagccagggtttcctggacaaca

SEQ ID NO: 1342 - RNA, 21 nt, synthetic construct
  source 1..21: mol_type = other RNA
  modified_base 1: mod_base = OTHER; note = 2'-O-methyluridine with a 3'-phosphorothioate linkage
  modified_base 2: mod_base = OTHER; note = 2'-O-methylcytidine with a 3'-phosphorothioate linkage
  modified_base 3: mod_base = cm
  modified_base 4: mod_base = OTHER; note = 2'-O-methyladenosine
  modified_base 5: mod_base = gm
  modified_base 6: mod_base = gm
  modified_base 7: mod_base = OTHER; note = 2'-O-methyladenosine
  modified_base 8: mod_base = OTHER; note = 2'-O-methyladenosine
  modified_base 9: mod_base = OTHER; note = 2'-fluoroadenosine
  modified_base 10: mod_base = OTHER; note = 2'-fluorocytidine
  modified_base 11: mod_base = OTHER; note = 2'-fluorocytidine
  modified_base 12: mod_base = cm
  modified_base 13: mod_base = um
  modified_base 14: mod_base = gm
  modified_base 15: mod_base = gm
  modified_base 16: mod_base = cm
  modified_base 17: mod_base = um
  modified_base 18: mod_base = um
  modified_base 19: mod_base = OTHER; note = 2'-O-methylguanosine with a 3'-phosphorothioate linkage
  modified_base 20: mod_base = OTHER; note = 2'-O-methylcytidine with a 3'-phosphorothioate linkage
  modified_base 21: mod_base = OTHER; note = 2'-O-methyladenosine
tccaggaaaccctggcttgca

SEQ ID NO: 1343 - RNA, 23 nt, synthetic construct
  source 1..23: mol_type = other RNA
  modified_base 1: mod_base = OTHER; note = 2'-O-methyluridine with a 3'-phosphorothioate linkage and a 5'-phosphate substitution
  modified_base 2: mod_base = OTHER; note = 2'-fluoroguanosine with a 3'-phosphorothioate linkage
  modified_base 3: mod_base = cm
  modified_base 4: mod_base = OTHER; note = 2'-O-methyladenosine
  modified_base 5: mod_base = OTHER; note = 2'-fluoroadenosine
  modified_base 6: mod_base = gm
  modified_base 7: mod_base = OTHER; note = 2'-fluorocytidine
  modified_base 8: mod_base = cm
  modified_base 9: mod_base = OTHER; note = 2'-O-methyladenosine
  modified_base 10: mod_base = gm
  modified_base 11: mod_base = gm
  modified_base 12: mod_base = gm
  modified_base 13: mod_base = um
  modified_base 14: mod_base = OTHER; note = 2'-fluorouridine
  modified_base 15: mod_base = um
  modified_base 16: mod_base = OTHER; note = 2'-fluorocytidine
  modified_base 17: mod_base = cm
  modified_base 18: mod_base = um
  modified_base 19: mod_base = gm
  modified_base 20: mod_base = gm
  modified_base 21: mod_base = OTHER; note = 2'-O-methyladenosine with a 3'-phosphorothioate linkage
  modified_base 22: mod_base = OTHER; note = 2'-O-methylcytidine with a 3'-phosphorothioate linkage
  modified_base 23: mod_base = OTHER; note = 2'-O-methyladenosine
tgcaagccagggtttcctggaca

SEQ ID NO: 1344 - RNA, 21 nt, synthetic construct
  source 1..21: mol_type = other RNA
  modified_base 1: mod_base = OTHER; note = 2'-O-methyluridine with a 3'-phosphorothioate linkage
  modified_base 2: mod_base = OTHER; note = 2'-O-methyluridine with a 3'-phosphorothioate linkage
  modified_base 3: mod_base = gm
  modified_base 4: mod_base = um
  modified_base 5: mod_base = OTHER; note = 2'-O-methyladenosine
  modified_base 6: mod_base = gm
  modified_base 7: mod_base = OTHER; note = 2'-O-methyladenosine
  modified_base 8: mod_base = OTHER; note = 2'-O-methyladenosine
  modified_base 9: mod_base = OTHER; note = 2'-fluoroguanosine
  modified_base 10: mod_base = OTHER; note = 2'-fluoroadenosine
  modified_base 11: mod_base = OTHER; note = 2'-fluorouridine
  modified_base 12: mod_base = gm
  modified_base 13: mod_base = gm
  modified_base 14: mod_base = OTHER; note = 2'-O-methyladenosine
  modified_base 15: mod_base = cm
  modified_base 16: mod_base = um
  modified_base 17: mod_base = cm
  modified_base 18: mod_base = um
  modified_base 19: mod_base = OTHER; note = 2'-O-methylguanosine with a 3'-phosphorothioate linkage
  modified_base 20: mod_base = OTHER; note = 2'-O-methyladenosine with a 3'-phosphorothioate linkage
  modified_base 21: mod_base = OTHER; note = 2'-O-methyladenosine
ttgtagaagatggactctgaa

SEQ ID NO: 1345 - RNA, 23 nt, synthetic construct
  source 1..23: mol_type = other RNA
  modified_base 1: mod_base = OTHER; note = 2'-O-methyluridine with a 3'-phosphorothioate linkage and a 5'-phosphate substitution
  modified_base 2: mod_base = OTHER; note = 2'-fluorouridine with a 3'-phosphorothioate linkage
  modified_base 3: mod_base = cm
  modified_base 4: mod_base = OTHER; note = 2'-O-methyladenosine
  modified_base 5: mod_base = OTHER; note = 2'-fluoroguanosine
  modified_base 6: mod_base = OTHER; note = 2'-O-methyladenosine
  modified_base 7: mod_base = OTHER; note = 2'-fluoroguanosine
  modified_base 8: mod_base = um
  modified_base 9: mod_base = cm
  modified_base 10: mod_base = cm
  modified_base 11: mod_base = OTHER; note = 2'-O-methyladenosine
  modified_base 12: mod_base = um
  modified_base 13: mod_base = cm
  modified_base 14: mod_base = OTHER; note = 2'-fluorouridine
  modified_base 15: mod_base = um
  modified_base 16: mod_base = OTHER; note = 2'-fluorocytidine
  modified_base 17: mod_base = um
  modified_base 18: mod_base = OTHER; note = 2'-O-methyladenosine
  modified_base 19: mod_base = cm
  modified_base 20: mod_base = OTHER; note = 2'-O-methyladenosine
  modified_base 21: mod_base = OTHER; note = 2'-O-methyladenosine with a 3'-phosphorothioate linkage
  modified_base 22: mod_base = OTHER; note = 2'-O-methylguanosine with a 3'-phosphorothioate linkage
  modified_base 23: mod_base = OTHER; note = 2'-O-methyladenosine
ttcagagtccatcttctacaaga

SEQ ID NO: 1346 - RNA, 21 nt, synthetic construct
  source 1..21: mol_type = other RNA
  modified_base 1: mod_base = OTHER; note = 2'-O-methyluridine with a 3'-phosphorothioate linkage
  modified_base 2: mod_base = OTHER; note = 2'-O-methylguanosine with a 3'-phosphorothioate linkage
  modified_base 3: mod_base = um
  modified_base 4: mod_base = OTHER; note = 2'-O-methyladenosine
  modified_base 5: mod_base = gm
  modified_base 6: mod_base = OTHER; note = 2'-O-methyladenosine
  modified_base 7: mod_base = OTHER; note = 2'-O-methyladenosine
  modified_base 8: mod_base = gm
  modified_base 9: mod_base = OTHER; note = 2'-fluoroadenosine
  modified_base 10: mod_base = OTHER; note = 2'-fluorouridine
  modified_base 11: mod_base = OTHER; note = 2'-fluoroguanosine
  modified_base 12: mod_base = gm
  modified_base 13: mod_base = OTHER; note = 2'-O-methyladenosine
  modified_base 14: mod_base = cm
  modified_base 15: mod_base = um
  modified_base 16: mod_base = cm
  modified_base 17: mod_base = um
  modified_base 18: mod_base = gm
  modified_base 19: mod_base = OTHER; note = 2'-O-methyladenosine with a 3'-phosphorothioate linkage
  modified_base 20: mod_base = OTHER; note = 2'-O-methyladenosine with a 3'-phosphorothioate linkage
  modified_base 21: mod_base = OTHER; note = 2'-O-methyladenosine
tgtagaagatggactctgaaa

SEQ ID NO: 1347 - RNA, 23 nt, synthetic construct
  source 1..23: mol_type = other RNA
  modified_base 1: mod_base = OTHER; note = 2'-O-methyluridine with a 3'-phosphorothioate linkage and a 5'-phosphate substitution
  modified_base 2: mod_base = OTHER; note = 2'-fluorouridine with a 3'-phosphorothioate linkage
  modified_base 3: mod_base = um
  modified_base 4: mod_base = cm
  modified_base 5: mod_base = OTHER; note = 2'-fluoroadenosine
  modified_base 6: mod_base = gm
  modified_base 7: mod_base = OTHER; note = 2'-fluoroadenosine
  modified_base 8: mod_base = gm
  modified_base 9: mod_base = um
  modified_base 10: mod_base = cm
  modified_base 11: mod_base = cm
  modified_base 12: mod_base = OTHER; note = 2'-O-methyladenosine
  modified_base 13: mod_base = um
  modified_base 14: mod_base = OTHER; note = 2'-fluorocytidine
  modified_base 15: mod_base = um
  modified_base 16: mod_base = OTHER; note = 2'-fluorouridine
  modified_base 17: mod_base = cm
  modified_base 18: mod_base = um
  modified_base 19: mod_base = OTHER; note = 2'-O-methyladenosine
  modified_base 20: mod_base = cm
  modified_base 21: mod_base = OTHER; note = 2'-O-methyladenosine with a 3'-phosphorothioate linkage
  modified_base 22: mod_base = OTHER; note = 2'-O-methyladenosine with a 3'-phosphorothioate linkage
  modified_base 23: mod_base = gm
tttcagagtccatcttctacaag

SEQ ID NO: 1348 - RNA, 21 nt, synthetic construct
  source 1..21: mol_type = other RNA
  modified_base 1: mod_base = OTHER; note = 2'-O-methyluridine with a 3'-phosphorothioate linkage
  modified_base 2: mod_base = OTHER; note = 2'-O-methyladenosine with a 3'-phosphorothioate linkage
  modified_base 3: mod_base = OTHER; note = 2'-O-methyladenosine
  modified_base 4: mod_base = um
  modified_base 5: mod_base = gm
  modified_base 6: mod_base = um
  modified_base 7: mod_base = um
  modified_base 8: mod_base = um
  modified_base 9: mod_base = OTHER; note = 2'-fluorouridine
  modified_base 10: mod_base = OTHER; note = 2'-fluoroguanosine
  modified_base 11: mod_base = OTHER; note = 2'-fluorouridine
  modified_base 12: mod_base = OTHER; note = 2'-O-methyladenosine
  modified_base 13: mod_base = cm
  modified_base 14: mod_base = OTHER; note = 2'-O-methyladenosine
  modified_base 15: mod_base = OTHER; note = 2'-O-methyladenosine
  modified_base 16: mod_base = um
  modified_base 17: mod_base = um
  modified_base 18: mod_base = OTHER; note = 2'-O-methyladenosine
  modified_base 19: mod_base = OTHER; note = 2'-O-methylcytidine with a 3'-phosphorothioate linkage
  modified_base 20: mod_base = OTHER; note = 2'-O-methyluridine with a 3'-phosphorothioate linkage
  modified_base 21: mod_base = OTHER; note = 2'-O-methyladenosine
taatgttttgtacaattacta

SEQ ID NO: 1349 - RNA, 23 nt, synthetic construct
  source 1..23: mol_type = other RNA
  modified_base 1: mod_base = OTHER; note = 2'-O-methyluridine with a 3'-phosphorothioate linkage and a 5'-phosphate substitution
  modified_base 2: mod_base = OTHER; note = 2'-fluoroadenosine with a 3'-phosphorothioate linkage
  modified_base 3: mod_base = gm
  modified_base 4: mod_base = um
  modified_base 5: mod_base = OTHER; note = 2'-fluoroadenosine
  modified_base 6: mod_base = OTHER; note = 2'-O-methyladenosine
  modified_base 7: mod_base = OTHER; note = 2'-fluorouridine
  modified_base 8: mod_base = um
  modified_base 9: mod_base = gm
  modified_base 10: mod_base = um
  modified_base 11: mod_base = OTHER; note = 2'-O-methyladenosine
  modified_base 12: mod_base = cm
  modified_base 13: mod_base = OTHER; note = 2'-O-methyladenosine
  modified_base 14: mod_base = OTHER; note = 2'-fluoroadenosine
  modified_base 15: mod_base = OTHER; note = 2'-O-methyladenosine
  modified_base 16: mod_base = OTHER; note = 2'-fluoroadenosine
  modified_base 17: mod_base = cm
  modified_base 18: mod_base = OTHER; note = 2'-O-methyladenosine
  modified_base 19: mod_base = um
  modified_base 20: mod_base = um
  modified_base 21: mod_base = OTHER; note = 2'-O-methyladenosine with a 3'-phosphorothioate linkage
  modified_base 22: mod_base = OTHER; note = 2'-O-methyladenosine with a 3'-phosphorothioate linkage
  modified_base 23: mod_base = um
tagtaattgtacaaaacattaat

SEQ ID NO: 1350 - RNA, 21 nt, synthetic construct
  source 1..21: mol_type = other RNA
  modified_base 1: mod_base = OTHER; note = 2'-O-methyluridine with a 3'-phosphorothioate linkage
  modified_base 2: mod_base = OTHER; note = 2'-O-methyladenosine with a 3'-phosphorothioate linkage
  modified_base 3: mod_base = um
  modified_base 4: mod_base = OTHER; note = 2'-O-methyladenosine
  modified_base 5: mod_base = cm
  modified_base 6: mod_base = OTHER; note = 2'-O-methyladenosine
  modified_base 7: mod_base = um
  modified_base 8: mod_base = um
  modified_base 9: mod_base = OTHER; note = 2'-fluorouridine
  modified_base 10: mod_base = OTHER; note = 2'-fluorouridine
  modified_base 11: mod_base = OTHER; note = 2'-fluoroguanosine
  modified_base 12: mod_base = um
  modified_base 13: mod_base = um
  modified_base 14: mod_base = OTHER; note = 2'-O-methyladenosine
  modified_base 15: mod_base = um
  modified_base 16: mod_base = OTHER; note = 2'-O-methyladenosine
  modified_base 17: mod_base = gm
  modified_base 18: mod_base = OTHER; note = 2'-O-methyladenosine
  modified_base 19: mod_base = OTHER; note = 2'-O-methyladenosine with a 3'-phosphorothioate linkage
  modified_base 20: mod_base = OTHER; note = 2'-O-methyluridine with a 3'-phosphorothioate linkage
  modified_base 21: mod_base = OTHER; note = 2'-O-methyladenosine
tatacattttgttatagaata

SEQ ID NO: 1351 - RNA, 23 nt, synthetic construct
  source 1..23: mol_type = other RNA
  modified_base 1: mod_base = OTHER; note = 2'-O-methyluridine with a 3'-phosphorothioate linkage and a 5'-phosphate substitution
  modified_base 2: mod_base = OTHER; note = 2'-fluoroadenosine with a 3'-phosphorothioate linkage
  modified_base 3: mod_base = um
  modified_base 4: mod_base = um
  modified_base 5: mod_base = OTHER; note = 2'-fluorocytidine
  modified_base 6: mod_base = um
  modified_base 7: mod_base = OTHER; note = 2'-fluoroadenosine
  modified_base 8: mod_base = um
  modified_base 9: mod_base = OTHER; note = 2'-O-methyladenosine
  modified_base 10: mod_base = OTHER; note = 2'-O-methyladenosine
  modified_base 11: mod_base = cm
  modified_base 12: mod_base = OTHER; note = 2'-O-methyladenosine
  modified_base 13: mod_base = OTHER; note = 2'-O-methyladenosine
  modified_base 14: mod_base = OTHER; note = 2'-fluoroadenosine
  modified_base 15: mod_base = OTHER; note = 2'-O-methyladenosine
  modified_base 16: mod_base = OTHER; note = 2'-fluorouridine
  modified_base 17: mod_base = gm
  modified_base 18: mod_base = um
  modified_base 19: mod_base = OTHER; note = 2'-O-methyladenosine
  modified_base 20: mod_base = um
  modified_base 21: mod_base = OTHER; note = 2'-O-methyladenosine with a 3'-phosphorothioate linkage
  modified_base 22: mod_base = OTHER; note = 2'-O-methylcytidine with a 3'-phosphorothioate linkage
  modified_base 23: mod_base = OTHER; note = 2'-O-methyladenosine
tattctataacaaaatgtataca

SEQ ID NO: 1352 - RNA, 21 nt, synthetic construct
  source 1..21: mol_type = other RNA
  modified_base 1: mod_base = OTHER; note = 2'-O-methyluridine with a 3'-phosphorothioate linkage
  modified_base 2: mod_base = OTHER; note = 2'-O-methyladenosine with a 3'-phosphorothioate linkage
  modified_base 3: mod_base = cm
  modified_base 4: mod_base = OTHER; note = 2'-O-methyladenosine
  modified_base 5: mod_base = um
  modified_base 6: mod_base = um
  modified_base 7: mod_base = um
  modified_base 8: mod_base = um
  modified_base 9: mod_base = OTHER; note = 2'-fluoroguanosine
  modified_base 10: mod_base = OTHER; note = 2'-fluorouridine
  modified_base 11: mod_base = OTHER; note = 2'-fluorouridine
  modified_base 12: mod_base = OTHER; note = 2'-O-methyladenosine
  modified_base 13: mod_base = um
  modified_base 14: mod_base = OTHER; note = 2'-O-methyladenosine
  modified_base 15: mod_base = gm
  modified_base 16: mod_base = OTHER; note = 2'-O-methyladenosine
  modified_base 17: mod_base = OTHER; note = 2'-O-methyladenosine
  modified_base 18: mod_base = um
  modified_base 19: mod_base = OTHER; note = 2'-O-methyladenosine with a 3'-phosphorothioate linkage
  modified_base 20: mod_base = OTHER; note = 2'-O-methylcytidine with a 3'-phosphorothioate linkage
  modified_base 21: mod_base = OTHER; note = 2'-O-methyladenosine
tacattttgttatagaataca

SEQ ID NO: 1353 - RNA, 23 nt, synthetic construct
  source 1..23: mol_type = other RNA
  modified_base 1: mod_base = OTHER; note = 2'-O-methyluridine with a 3'-phosphorothioate linkage and a 5'-phosphate substitution
  modified_base 2: mod_base = OTHER; note = 2'-fluoroguanosine with a 3'-phosphorothioate linkage
  modified_base 3: mod_base = um
  modified_base 4: mod_base = OTHER; note = 2'-O-methyladenosine
  modified_base 5: mod_base = OTHER; note = 2'-fluorouridine
  modified_base 6: mod_base = um
  modified_base 7: mod_base = OTHER; note = 2'-fluorocytidine
  modified_base 8: mod_base = um
  modified_base 9: mod_base = OTHER; note = 2'-O-methyladenosine
  modified_base 10: mod_base = um
  modified_base 11: mod_base = OTHER; note = 2'-O-methyladenosine
  modified_base 12: mod_base = OTHER; note = 2'-O-methyladenosine
  modified_base 13: mod_base = cm
  modified_base 14: mod_base = OTHER; note = 2'-fluoroadenosine
  modified_base 15: mod_base = OTHER; note = 2'-O-methyladenosine
  modified_base 16: mod_base = OTHER; note = 2'-fluoroadenosine
  modified_base 17: mod_base = OTHER; note = 2'-O-methyladenosine
  modified_base 18: mod_base = um
  modified_base 19: mod_base = gm
  modified_base 20: mod_base = um
  modified_base 21: mod_base = OTHER; note = 2'-O-methyladenosine with a 3'-phosphorothioate linkage
  modified_base 22: mod_base = OTHER; note = 2'-O-methyluridine with a 3'-phosphorothioate linkage
  modified_base 23: mod_base = OTHER; note = 2'-O-methyladenosine
tgtattctataacaaaatgtata

SEQ ID NO: 1354 - RNA, 21 nt, synthetic construct
  source 1..21: mol_type = other RNA
  modified_base 1: mod_base = OTHER; note = 2'-O-methyladenosine with a 3'-phosphorothioate linkage
  modified_base 2: mod_base = OTHER; note = 2'-O-methylcytidine with a 3'-phosphorothioate linkage
  modified_base 3: mod_base = OTHER; note = 2'-O-methyladenosine
  modified_base 4: mod_base = um
  modified_base 5: mod_base = um
  modified_base 6: mod_base = um
  modified_base 7: mod_base = um
  modified_base 8: mod_base = gm
  modified_base 9: mod_base = OTHER; note = 2'-fluorouridine
  modified_base 10: mod_base = OTHER; note = 2'-fluorouridine
  modified_base 11: mod_base = OTHER; note = 2'-fluoroadenosine
  modified_base 12: mod_base = um
  modified_base 13: mod_base = OTHER; note = 2'-O-methyladenosine
  modified_base 14: mod_base = gm
  modified_base 15: mod_base = OTHER; note = 2'-O-methyladenosine
  modified_base 16: mod_base = OTHER; note = 2'-O-methyladenosine
  modified_base 17: mod_base = um
  modified_base 18: mod_base = OTHER; note = 2'-O-methyladenosine
  modified_base 19: mod_base = OTHER; note = 2'-O-methylcytidine with a 3'-phosphorothioate linkage
  modified_base 20: mod_base = OTHER; note = 2'-O-methyluridine with a 3'-phosphorothioate linkage
  modified_base 21: mod_base = OTHER; note = 2'-O-methyladenosine
acattttgttatagaatacta

SEQ ID NO: 1355 - RNA, 23 nt, synthetic construct
  source 1..23: mol_type = other RNA
  modified_base 1: mod_base = OTHER; note = 2'-O-methyluridine with a 3'-phosphorothioate linkage and a 5'-phosphate substitution
  modified_base 2: mod_base = OTHER; note = 2'-fluoroadenosine with a 3'-phosphorothioate linkage
  modified_base 3: mod_base = gm
  modified_base 4: mod_base = um
  modified_base 5: mod_base = OTHER; note = 2'-fluoroadenosine
  modified_base 6: mod_base = um
  modified_base 7: mod_base = OTHER; note = 2'-fluorouridine
  modified_base 8: mod_base = cm
  modified_base 9: mod_base = um
  modified_base 10: mod_base = OTHER; note = 2'-O-methyladenosine
  modified_base 11: mod_base = um
  modified_base 12: mod_base = OTHER; note = 2'-O-methyladenosine
  modified_base 13: mod_base = OTHER; note = 2'-O-methyladenosine
  modified_base 14: mod_base = OTHER; note = 2'-fluorocytidine
  modified_base 15: mod_base = OTHER; note = 2'-O-methyladenosine
  modified_base 16: mod_base = OTHER; note = 2'-fluoroadenosine
  modified_base 17: mod_base = OTHER; note = 2'-O-methyladenosine
  modified_base 18: mod_base = OTHER; note = 2'-O-methyladenosine
  modified_base 19: mod_base = um
  modified_base 20: mod_base = gm
  modified_base 21: mod_base = OTHER; note = 2'-O-methyluridine with a 3'-phosphorothioate linkage
  modified_base 22: mod_base = OTHER; note = 2'-O-methyladenosine with a 3'-phosphorothioate linkage
  modified_base 23: mod_base = um
tagtattctataacaaaatgtat

SEQ ID NO: 1356 - RNA, 21 nt, synthetic construct
  source 1..21: mol_type = other RNA
  modified_base 1: mod_base = OTHER; note = 2'-O-methylcytidine with a 3'-phosphorothioate linkage
  modified_base 2: mod_base = OTHER; note = 2'-O-methyladenosine with a 3'-phosphorothioate linkage
  modified_base 3: mod_base = OTHER; note = 2'-O-methyladenosine
  modified_base 4: mod_base = um
  modified_base 5: mod_base = gm
  modified_base 6: mod_base = um
  modified_base 7: mod_base = um
  modified_base 8: mod_base = gm
  modified_base 9: mod_base = OTHER; note = 2'-fluorouridine
  modified_base 10: mod_base = OTHER; note = 2'-fluorocytidine
  modified_base 11: mod_base = OTHER; note = 2'-fluoroadenosine
  modified_base 12: mod_base = OTHER; note = 2'-O-methyladenosine
  modified_base 13: mod_base = gm
  modified_base 14: mod_base = OTHER; note = 2'-O-methyladenosine
  modified_base 15: mod_base = cm
  modified_base 16: mod_base = um
  modified_base 17: mod_base = um
  modified_base 18: mod_base = um
  modified_base 19: mod_base = OTHER; note = 2'-O-methyluridine with a 3'-phosphorothioate linkage
  modified_base 20: mod_base = OTHER; note = 2'-O-methyluridine with a 3'-phosphorothioate linkage
  modified_base 21: mod_base = OTHER; note = 2'-O-methyladenosine
caatgttgtcaagacttttta

SEQ ID NO: 1357 - RNA, 23 nt, synthetic construct
  source 1..23: mol_type = other RNA
  modified_base 1: mod_base = OTHER; note = 2'-O-methyluridine with a 3'-phosphorothioate linkage and a 5'-phosphate substitution
  modified_base 2: mod_base = OTHER; note = 2'-fluoroadenosine with a 3'-phosphorothioate linkage
  modified_base 3: mod_base = OTHER; note = 2'-O-methyladenosine
  modified_base 4: mod_base = OTHER; note = 2'-O-methyladenosine
  modified_base 5: mod_base = OTHER; note = 2'-fluoroadenosine
  modified_base 6: mod_base = OTHER; note = 2'-O-methyladenosine
  modified_base 7: mod_base = OTHER; note = 2'-fluoroguanosine
  modified_base 8: mod_base = um
  modified_base 9: mod_base = cm
  modified_base 10: mod_base = um
  modified_base 11: mod_base = um
  modified_base 12: mod_base = gm
  modified_base 13: mod_base = OTHER; note = 2'-O-methyladenosine
  modified_base 14: mod_base = OTHER; note = 2'-fluorocytidine
  modified_base 15: mod_base = OTHER; note = 2'-O-methyladenosine
  modified_base 16: mod_base = OTHER; note = 2'-fluoroadenosine
  modified_base 17: mod_base = cm
  modified_base 18: mod_base = OTHER; note = 2'-O-methyladenosine
  modified_base 19: mod_base = um
  modified_base 20: mod_base = um
  modified_base 21: mod_base = OTHER; note = 2'-O-methylguanosine with a 3'-phosphorothioate linkage
  modified_base 22: mod_base = OTHER; note = 2'-O-methyluridine with a 3'-phosphorothioate linkage
  modified_base 23: mod_base = OTHER; note = 2'-O-methyladenosine
taaaaagtcttgacaacattgta

SEQ ID NO: 1358 - RNA, 21 nt, synthetic construct
  source 1..21: mol_type = other RNA
  modified_base 1: mod_base = OTHER; note = 2'-O-methyladenosine with a 3'-phosphorothioate linkage
  modified_base 2: mod_base = OTHER; note = 2'-O-methyladenosine with a 3'-phosphorothioate linkage
  modified_base 3: mod_base = um
  modified_base 4: mod_base = gm
  modified_base 5: mod_base = um
  modified_base 6: mod_base = um
  modified_base 7: mod_base = gm
  modified_base 8: mod_base = um
  modified_base 9: mod_base = OTHER; note = 2'-fluorocytidine
  modified_base 10: mod_base = OTHER; note = 2'-fluoroadenosine
  modified_base 11: mod_base = OTHER; note = 2'-fluoroadenosine
  modified_base 12: mod_base = gm
  modified_base 13: mod_base = OTHER; note = 2'-O-methyladenosine
  modified_base 14: mod_base = cm
  modified_base 15: mod_base = um
  modified_base 16: mod_base = um
  modified_base 17: mod_base = um
  modified_base 18: mod_base = um
  modified_base 19: mod_base = OTHER; note = 2'-O-methyluridine with a 3'-phosphorothioate linkage
  modified_base 20: mod_base = OTHER; note = 2'-O-methylcytidine with a 3'-phosphorothioate linkage
  modified_base 21: mod_base = OTHER; note = 2'-O-methyladenosine
aatgttgtcaagactttttca

SEQ ID NO: 1359 - RNA, 23 nt, synthetic construct
  source 1..23: mol_type = other RNA
  modified_base 1: mod_base = OTHER; note = 2'-O-methyluridine with a 3'-phosphorothioate linkage and a 5'-phosphate substitution
  modified_base 2: mod_base = OTHER; note = 2'-fluoroguanosine with a 3'-phosphorothioate linkage
  modified_base 3: mod_base = OTHER; note = 2'-O-methyladenosine
  modified_base 4: mod_base = OTHER; note = 2'-O-methyladenosine
  modified_base 5: mod_base = OTHER; note = 2'-fluoroadenosine
  modified_base 6: mod_base = OTHER; note = 2'-O-methyladenosine
  modified_base 7: mod_base = OTHER; note = 2'-fluoroadenosine
  modified_base 8: mod_base = gm
  modified_base 9: mod_base = um
  modified_base 10: mod_base = cm
  modified_base 11: mod_base = um
  modified_base 12: mod_base = um
  modified_base 13: mod_base = gm
  modified_base 14: mod_base = OTHER; note = 2'-fluoroadenosine
  modified_base 15: mod_base = cm
  modified_base 16: mod_base = OTHER; note = 2'-fluoroadenosine
  modified_base 17: mod_base = OTHER; note = 2'-O-methyladenosine
  modified_base 18: mod_base = cm
  modified_base 19: mod_base = OTHER; note = 2'-O-methyladenosine
  modified_base 20: mod_base = um
  modified_base 21: mod_base = OTHER; note = 2'-O-methyluridine with a 3'-phosphorothioate linkage
  modified_base 22: mod_base = OTHER; note = 2'-O-methylguanosine with a 3'-phosphorothioate linkage
  modified_base 23: mod_base = um
tgaaaaagtcttgacaacattgt

SEQ ID NO: 1360 - RNA, 21 nt, synthetic construct
  source 1..21: mol_type = other RNA
  modified_base 1: mod_base = OTHER; note = 2'-O-methyladenosine with a 3'-phosphorothioate linkage
  modified_base 2: mod_base = OTHER; note = 2'-O-methyluridine with a 3'-phosphorothioate linkage
  modified_base 3: mod_base = gm
  modified_base 4: mod_base = um
  modified_base 5: mod_base = um
  modified_base 6: mod_base = gm
  modified_base 7: mod_base = um
  modified_base 8: mod_base = cm
  modified_base 9: mod_base = OTHER; note = 2'-fluoroadenosine
  modified_base 10: mod_base = OTHER; note = 2'-fluoroadenosine
  modified_base 11: mod_base = OTHER; note = 2'-fluoroguanosine
  modified_base 12: mod_base = OTHER; note = 2'-O-methyladenosine
  modified_base 13: mod_base = cm
  modified_base 14: mod_base = um
  modified_base 15: mod_base = um
  modified_base 16: mod_base = um
  modified_base 17: mod_base = um
  modified_base 18: mod_base = um
  modified_base 19: mod_base = OTHER; note = 2'-O-methylcytidine with a 3'-phosphorothioate linkage
  modified_base 20: mod_base = OTHER; note = 2'-O-methylguanosine with a 3'-phosphorothioate linkage
  modified_base 21: mod_base = OTHER; note = 2'-O-methyladenosine
atgttgtcaagactttttcga

SEQ ID NO: 1361 - RNA, 23 nt, synthetic construct
  source 1..23: mol_type = other RNA
  modified_base 1: mod_base = OTHER; note = 2'-O-methyluridine with a 3'-phosphorothioate linkage and a 5'-phosphate substitution
  modified_base 2: mod_base = OTHER; note = 2'-fluorocytidine with a 3'-phosphorothioate linkage
  modified_base 3: mod_base = gm
  modified_base 4: mod_base = OTHER; note = 2'-O-methyladenosine
  modified_base 5: mod_base = OTHER; note = 2'-fluoroadenosine
  modified_base 6: mod_base = OTHER; note = 2'-O-methyladenosine
  modified_base 7: mod_base = OTHER; note = 2'-fluoroadenosine
  modified_base 8: mod_base = OTHER; note = 2'-O-methyladenosine
  modified_base 9: mod_base = gm
  modified_base 10: mod_base = um
  modified_base 11: mod_base = cm
  modified_base 12: mod_base = um
  modified_base 13: mod_base = um
  modified_base 14: mod_base = OTHER; note = 2'-fluoroguanosine
  modified_base 15: mod_base = OTHER; note = 2'-O-methyladenosine
  modified_base 16: mod_base = OTHER; note = 2'-fluorocytidine
  modified_base 17: mod_base = OTHER; note = 2'-O-methyladenosine
  modified_base 18: mod_base = OTHER; note = 2'-O-methyladenosine
  modified_base 19: mod_base = cm
  modified_base 20: mod_base = OTHER; note = 2'-O-methyladenosine
  modified_base 21: mod_base = OTHER; note = 2'-O-methyluridine with a 3'-phosphorothioate linkage
  modified_base 22: mod_base = OTHER; note = 2'-O-methyluridine with a 3'-phosphorothioate linkage
  modified_base 23: mod_base = gm
tcgaaaaagtcttgacaacattg

SEQ ID NO: 1362 - RNA, 21 nt, synthetic construct
  source 1..21: mol_type = other RNA
  modified_base 1: mod_base = OTHER; note = 2'-O-methyluridine with a 3'-phosphorothioate linkage
  modified_base 2: mod_base = OTHER; note = 2'-O-methylcytidine with a 3'-phosphorothioate linkage
  modified_base 3: mod_base = um
  modified_base 4: mod_base = gm
  modified_base 5: mod_base = cm
  modified_base 6: mod_base = OTHER; note = 2'-O-methyladenosine
  modified_base 7: mod_base = um
  modified_base 8: mod_base = gm
  modified_base 9: mod_base = OTHER; note = 2'-fluoroadenosine
  modified_base 10: mod_base = OTHER; note = 2'-fluorouridine
  modified_base 11: mod_base = OTHER; note = 2'-fluoroguanosine
  modified_base 12: mod_base = um
  modified_base 13: mod_base = cm
  modified_base 14: mod_base = cm
  modified_base 15: mod_base = OTHER; note = 2'-O-methyladenosine
  modified_base 16: mod_base = um
  modified_base 17: mod_base = gm
  modified_base 18: mod_base = OTHER; note = 2'-O-methyladenosine
  modified_base 19: mod_base = OTHER; note = 2'-O-methyladenosine with a 3'-phosphorothioate linkage
  modified_base 20: mod_base = OTHER; note = 2'-O-methylcytidine with a 3'-phosphorothioate linkage
  modified_base 21: mod_base = OTHER; note = 2'-O-methyladenosine
tctgcatgatgtccatgaaca

SEQ ID NO: 1363 - RNA, 23 nt, synthetic construct
  source 1..23: mol_type = other RNA
  modified_base 1: mod_base = OTHER; note = 2'-O-methyluridine with a 3'-phosphorothioate linkage and a 5'-phosphate substitution
  modified_base 2: mod_base = OTHER; note = 2'-fluoroguanosine with a 3'-phosphorothioate linkage
  modified_base 3: mod_base = um
  modified_base 4: mod_base = um
  modified_base 5: mod_base = OTHER; note = 2'-fluorocytidine
  modified_base 6: mod_base = OTHER; note = 2'-O-methyladenosine
  modified_base 7: mod_base = OTHER; note = 2'-fluorouridine
  modified_base 8: mod_base = gm
  modified_base 9: mod_base = gm
  modified_base 10: mod_base = OTHER; note = 2'-O-methyladenosine
  modified_base 11: mod_base = cm
  modified_base 12: mod_base = OTHER; note = 2'-O-methyladenosine
  modified_base 13: mod_base = um
  modified_base 14: mod_base = OTHER; note = 2'-fluorocytidine
  modified_base 15: mod_base = OTHER; note = 2'-O-methyladenosine
  modified_base 16: mod_base = OTHER; note = 2'-fluorouridine
  modified_base 17: mod_base = gm
  modified_base 18: mod_base = cm
  modified_base 19: mod_base = OTHER; note = 2'-O-methyladenosine
  modified_base 20: mod_base = gm
  modified_base 21: mod_base = OTHER; note = 2'-O-methyladenosine with a 3'-phosphorothioate linkage
  modified_base 22: mod_base = OTHER; note = 2'-O-methyluridine with a 3'-phosphorothioate linkage
  modified_base 23: mod_base = gm
tgttcatggacatcatgcagatg

SEQ ID NO: 1364 - RNA, 21 nt, synthetic construct
  source 1..21: mol_type = other RNA
  modified_base 1: mod_base = OTHER; note = 2'-O-methylcytidine with a 3'-phosphorothioate linkage
  modified_base 2: mod_base = OTHER; note = 2'-O-methyluridine with a 3'-phosphorothioate linkage
  modified_base 3: mod_base = gm
  modified_base 4: mod_base = cm
  modified_base 5: mod_base = OTHER; note = 2'-O-methyladenosine
  modified_base 6: mod_base = um
  modified_base 7: mod_base = gm
  modified_base 8: mod_base = OTHER; note = 2'-O-methyladenosine
  modified_base 9: mod_base = OTHER; note = 2'-fluorouridine
  modified_base 10: mod_base = OTHER; note = 2'-fluoroguanosine
  modified_base 11: mod_base = OTHER; note = 2'-fluorouridine
  modified_base 12: mod_base = cm
  modified_base 13: mod_base = cm
  modified_base 14: mod_base = OTHER; note = 2'-O-methyladenosine
  modified_base 15: mod_base = um
  modified_base 16: mod_base = gm
  modified_base 17: mod_base = OTHER; note = 2'-O-methyladenosine
  modified_base 18: mod_base = OTHER; note = 2'-O-methyladenosine
  modified_base 19: mod_base = OTHER; note = 2'-O-methylcytidine with a 3'-phosphorothioate linkage
  modified_base 20: mod_base = OTHER; note = 2'-O-methyladenosine with a 3'-phosphorothioate linkage
  modified_base 21: mod_base = OTHER; note = 2'-O-methyladenosine
ctgcatgatgtccatgaacaa

SEQ ID NO: 1365 - RNA, 23 nt, synthetic construct
  source 1..23: mol_type = other RNA
  modified_base 1: mod_base = OTHER; note = 2'-O-methyluridine with a 3'-phosphorothioate linkage and a 5'-phosphate substitution
  modified_base 2: mod_base = OTHER; note = 2'-fluorouridine with a 3'-phosphorothioate linkage
  modified_base 3: mod_base = gm
  modified_base 4: mod_base = um
  modified_base 5: mod_base = OTHER; note = 2'-fluorouridine
  modified_base 6: mod_base = cm
  modified_base 7: mod_base = OTHER; note = 2'-fluoroadenosine
  modified_base 8: mod_base = um
  modified_base 9: mod_base = gm
  modified_base 10: mod_base = gm
  modified_base 11: mod_base = OTHER; note = 2'-O-methyladenosine
  modified_base 12: mod_base = cm
  modified_base 13: mod_base = OTHER; note = 2'-O-methyladenosine
  modified_base 14: mod_base = OTHER; note = 2'-fluorouridine
  modified_base 15: mod_base = cm
  modified_base 16: mod_base = OTHER; note = 2'-fluoroadenosine
  modified_base 17: mod_base = um
  modified_base 18: mod_base = gm
  modified_base 19: mod_base = cm
  modified_base 20: mod_base = OTHER; note = 2'-O-methyladenosine
  modified_base 21: mod_base = OTHER; note = 2'-O-methylguanosine with a 3'-phosphorothioate linkage
  modified_base 22: mod_base = OTHER; note = 2'-O-methyladenosine with a 3'-phosphorothioate linkage
  modified_base 23: mod_base = um
ttgttcatggacatcatgcagat

SEQ ID NO: 1366 - RNA, 21 nt, synthetic construct
  source 1..21: mol_type = other RNA
  modified_base 1: mod_base = OTHER; note = 2'-O-methyluridine with a 3'-phosphorothioate linkage
  modified_base 2: mod_base = OTHER; note = 2'-O-methyladenosine with a 3'-phosphorothioate linkage
  modified_base 3: mod_base = OTHER; note = 2'-O-methyladenosine
  modified_base 4: mod_base = gm
  modified_base 5: mod_base = OTHER; note = 2'-O-methyladenosine
  modified_base 6: mod_base = um
  modified_base 7: mod_base = cm
  modified_base 8: mod_base = um
  modified_base 9: mod_base = OTHER; note = 2'-fluoroguanosine
  modified_base 10: mod_base = OTHER; note = 2'-fluorouridine
  modified_base 11: mod_base = OTHER; note = 2'-fluoroguanosine
  modified_base 12: mod_base = gm
  modified_base 13: mod_base = um
  modified_base 14: mod_base = um
  modified_base 15: mod_base = gm
  modified_base 16: mod_base = gm
  modified_base 17: mod_base = OTHER; note = 2'-O-methyladenosine
  modified_base 18: mod_base = OTHER; note = 2'-O-methyladenosine
  modified_base 19: mod_base = OTHER; note = 2'-O-methyluridine with a 3'-phosphorothioate linkage
  modified_base 20: mod_base = OTHER; note = 2'-O-methyluridine with a 3'-phosphorothioate linkage
  modified_base 21: mod_base = OTHER; note = 2'-O-methyladenosine
taagatctgtggttggaatta

SEQ ID NO: 1367 - RNA, 23 nt, synthetic construct
  source 1..23: mol_type = other RNA
  modified_base 1: mod_base = OTHER; note = 2'-O-methyluridine with a 3'-phosphorothioate linkage and a 5'-phosphate substitution
  modified_base 2: mod_base = OTHER; note = 2'-fluoroadenosine with a 3'-phosphorothioate linkage
  modified_base 3: mod_base = OTHER; note = 2'-O-methyladenosine
  modified_base 4: mod_base = um
  modified_base 5: mod_base = OTHER; note = 2'-fluorouridine
  modified_base 6: mod_base = cm
  modified_base 7: mod_base = OTHER; note = 2'-fluorocytidine
  modified_base 8: mod_base = OTHER; note = 2'-O-methyladenosine
  modified_base 9: mod_base = OTHER; note = 2'-O-methyladenosine
  modified_base 10: mod_base = cm
  modified_base 11: mod_base = cm
  modified_base 12: mod_base = OTHER; note = 2'-O-methyladenosine
  modified_base 13: mod_base = cm
  modified_base 14: mod_base = OTHER; note = 2'-fluoroadenosine
  modified_base 15: mod_base = gm
  modified_base 16: mod_base = OTHER; note = 2'-fluoroadenosine
  modified_base 17: mod_base = um
  modified_base 18: mod_base = cm
  modified_base 19: mod_base = um
  modified_base 20: mod_base = um
  modified_base 21: mod_base = OTHER; note = 2'-O-methyladenosine with a 3'-phosphorothioate linkage
  modified_base 22: mod_base = OTHER; note = 2'-O-methyluridine with a 3'-phosphorothioate linkage
  modified_base 23: mod_base = um
taattccaaccacagatcttatt

SEQ ID NO: 1368 - RNA, 21 nt, synthetic construct
  source 1..21: mol_type = other RNA
  modified_base 1: mod_base = OTHER; note = 2'-O-methyladenosine with a 3'-phosphorothioate linkage
  modified_base 2: mod_base = OTHER; note = 2'-O-methyladenosine with a 3'-phosphorothioate linkage
  modified_base 3: mod_base = gm
  modified_base 4: mod_base = OTHER; note = 2'-O-methyladenosine
  modified_base 5: mod_base = um
  modified_base 6: mod_base = cm
  modified_base 7: mod_base = um
  modified_base 8: mod_base = gm
  modified_base 9: mod_base = OTHER; note = 2'-fluorouridine
  modified_base 10: mod_base = OTHER; note = 2'-fluoroguanosine
  modified_base 11: mod_base = OTHER; note = 2'-fluoroguanosine
  modified_base 12: mod_base = um
  modified_base 13: mod_base = um
  modified_base 14: mod_base = gm
  modified_base 15: mod_base = gm
  modified_base 16: mod_base = OTHER; note = 2'-O-methyladenosine
  modified_base 17: mod_base = OTHER; note = 2'-O-methyladenosine
  modified_base 18: mod_base = um
  modified_base 19: mod_base = OTHER; note = 2'-O-methyluridine with a 3'-phosphorothioate linkage
  modified_base 20: mod_base = OTHER; note = 2'-O-methyladenosine with a 3'-phosphorothioate linkage
  modified_base 21: mod_base = OTHER; note = 2'-O-methyladenosine
aagatctgtggttggaattaa

SEQ ID NO: 1369 - RNA, 23 nt, synthetic construct
  source 1..23: mol_type = other RNA
  modified_base 1: mod_base = OTHER; note = 2'-O-methyluridine with a 3'-phosphorothioate linkage and a 5'-phosphate substitution
  modified_base 2: mod_base = OTHER; note = 2'-fluorouridine with a 3'-phosphorothioate linkage
  modified_base 3: mod_base = OTHER; note = 2'-O-methyladenosine
  modified_base 4: mod_base = OTHER; note = 2'-O-methyladenosine
  modified_base 5: mod_base = OTHER; note = 2'-fluorouridine
  modified_base 6: mod_base = um
  modified_base 7: mod_base = OTHER; note = 2'-fluorocytidine
  modified_base 8: mod_base = cm
  modified_base 9: mod_base = OTHER; note = 2'-O-methyladenosine
  modified_base 10: mod_base = OTHER; note = 2'-O-methyladenosine
  modified_base 11: mod_base = cm
  modified_base 12: mod_base = cm
  modified_base 13: mod_base = OTHER; note = 2'-O-methyladenosine
  modified_base 14: mod_base = OTHER; note = 2'-fluorocytidine
  modified_base 15: mod_base = OTHER; note = 2'-O-methyladenosine
  modified_base 16: mod_base = OTHER; note = 2'-fluoroguanosine
  modified_base 17: mod_base = OTHER; note = 2'-O-methyladenosine
  modified_base 18: mod_base = um
  modified_base 19: mod_base = cm
  modified_base 20: mod_base = um
  modified_base 21: mod_base = OTHER; note = 2'-O-methyluridine with a 3'-phosphorothioate linkage
  modified_base 22: mod_base = OTHER; note = 2'-O-methyladenosine with a 3'-phosphorothioate linkage
  modified_base 23: mod_base = um
ttaattccaaccacagatcttat

SEQ ID NO: 1370 - RNA, 21 nt, synthetic construct
  source 1..21: mol_type = other RNA
  modified_base 1: mod_base = OTHER; note = 2'-O-methyladenosine with a 3'-phosphorothioate linkage
  modified_base 2: mod_base = OTHER; note = 2'-O-methylguanosine with a 3'-phosphorothioate linkage
  modified_base 3: mod_base = OTHER; note = 2'-O-methyladenosine
  modified_base 4: mod_base = um
  modified_base 5: mod_base = cm
  modified_base 6: mod_base = um
  modified_base 7: mod_base = gm
  modified_base 8: mod_base = um
  modified_base 9: mod_base = OTHER; note = 2'-fluoroguanosine
  modified_base 10: mod_base = OTHER; note = 2'-fluoroguanosine
  modified_base 11: mod_base = OTHER; note = 2'-fluorouridine
  modified_base 12: mod_base = um
  modified_base 13: mod_base = gm
  modified_base 14: mod_base = gm
  modified_base 15: mod_base = OTHER; note = 2'-O-methyladenosine
  modified_base 16: mod_base = OTHER; note = 2'-O-methyladenosine
  modified_base 17: mod_base = um
  modified_base 18: mod_base = um
  modified_base 19: mod_base = OTHER; note = 2'-O-methyladenosine with a 3'-phosphorothioate linkage
  modified_base 20: mod_base = OTHER; note = 2'-O-methyluridine with a 3'-phosphorothioate linkage
  modified_base 21: mod_base = OTHER; note = 2'-O-methyladenosine
agatctgtggttggaattata

SEQ ID NO: 1371 - RNA, 23 nt, synthetic construct
  source 1..23: mol_type = other RNA
  modified_base 1: mod_base = OTHER; note = 2'-O-methyluridine with a 3'-phosphorothioate linkage and a 5'-phosphate substitution
  modified_base 2: mod_base = OTHER; note = 2'-fluoroadenosine with a 3'-phosphorothioate linkage
  modified_base 3: mod_base = um
  modified_base 4: mod_base = OTHER; note = 2'-O-methyladenosine
  modified_base 5: mod_base = OTHER; note = 2'-fluoroadenosine
  modified_base 6: mod_base = um
  modified_base 7: mod_base = OTHER; note = 2'-fluorouridine
  modified_base 8: mod_base = cm
  modified_base 9: mod_base = cm
  modified_base 10: mod_base = OTHER; note = 2'-O-methyladenosine
  modified_base 11: mod_base = OTHER; note = 2'-O-methyladenosine
  modified_base 12: mod_base = cm
  modified_base 13: mod_base = cm
  modified_base 14: mod_base = OTHER; note = 2'-fluoroadenosine
  modified_base 15: mod_base = cm
  modified_base 16: mod_base = OTHER; note = 2'-fluoroadenosine
  modified_base 17: mod_base = gm
  modified_base 18: mod_base = OTHER; note = 2'-O-methyladenosine
  modified_base 19: mod_base = um
  modified_base 20: mod_base = cm
  modified_base 21: mod_base = OTHER; note = 2'-O-methyluridine with a 3'-phosphorothioate linkage
  modified_base 22: mod_base = OTHER; note = 2'-O-methyluridine with a 3'-phosphorothioate linkage
  modified_base 23: mod_base = OTHER; note = 2'-O-methyladenosine
tataattccaaccacagatctta

SEQ ID NO: 1372 - RNA, 21 nt, synthetic construct
  source 1..21: mol_type = other RNA
  modified_base 1: mod_base = OTHER; note = 2'-O-methyluridine with a 3'-phosphorothioate linkage
  modified_base 2: mod_base = OTHER; note = 2'-O-methylguanosine with a 3'-phosphorothioate linkage
  modified_base 3: mod_base = um
  modified_base 4: mod_base = OTHER; note = 2'-O-methyladenosine
  modified_base 5: mod_base = um
  modified_base 6: mod_base = OTHER; note = 2'-O-methyladenosine
  modified_base 7: mod_base = um
  modified_base 8: mod_base = um
  modified_base 9: mod_base = OTHER; note = 2'-fluorouridine
  modified_base 10: mod_base = OTHER; note = 2'-fluoroadenosine
  modified_base 11: mod_base = OTHER; note = 2'-fluorocytidine
  modified_base 12: mod_base = um
  modified_base 13: mod_base = um
  modified_base 14: mod_base = cm
  modified_base 15: mod_base = cm
  modified_base 16: mod_base = OTHER; note = 2'-O-methyladenosine
  modified_base 17: mod_base = gm
  modified_base 18: mod_base = um
  modified_base 19: mod_base = OTHER; note = 2'-O-methyluridine with a 3'-phosphorothioate linkage
  modified_base 20: mod_base = OTHER; note = 2'-O-methylcytidine with a 3'-phosphorothioate linkage
  modified_base 21: mod_base = OTHER; note = 2'-O-methyladenosine
tgtatatttacttccagttca

SEQ ID NO: 1373 - RNA, 23 nt, synthetic construct
  source 1..23: mol_type = other RNA
  modified_base 1: mod_base = OTHER; note = 2'-O-methyluridine with a 3'-phosphorothioate linkage and a 5'-phosphate substitution
  modified_base 2: mod_base = OTHER; note = 2'-fluoroguanosine with a 3'-phosphorothioate linkage
  modified_base 3: mod_base = OTHER; note = 2'-O-methyladenosine
  modified_base 4: mod_base = OTHER; note = 2'-O-methyladenosine
  modified_base 5: mod_base = OTHER; note = 2'-fluorocytidine
  modified_base 6: mod_base = um
  modified_base 7: mod_base = OTHER; note = 2'-fluoroguanosine
  modified_base 8: mod_base = gm
  modified_base 9: mod_base = OTHER; note = 2'-O-methyladenosine
  modified_base 10: mod_base = OTHER; note = 2'-O-methyladenosine
  modified_base 11: mod_base = gm
  modified_base 12: mod_base = um
  modified_base 13: mod_base = OTHER; note = 2'-O-methyladenosine
  modified_base 14: mod_base = OTHER; note = 2'-fluoroadenosine
  modified_base 15: mod_base = OTHER; note = 2'-O-methyladenosine
  modified_base 16: mod_base = OTHER; note = 2'-fluorouridine
  modified_base 17: mod_base = OTHER; note = 2'-O-methyladenosine
  modified_base 18: mod_base = um
  modified_base 19: mod_base = OTHER; note = 2'-O-methyladenosine
  modified_base 20: mod_base = cm
  modified_base 21: mod_base = OTHER; note = 2'-O-methyladenosine with a 3'-phosphorothioate linkage
  modified_base 22: mod_base = OTHER; note = 2'-O-methylguanosine with a 3'-phosphorothioate linkage
  modified_base 23: mod_base = gm
tgaactggaagtaaatatacagg

SEQ ID NO: 1374 - RNA, 21 nt, synthetic construct
  source 1..21: mol_type = other RNA
  modified_base 1: mod_base = OTHER; note = 2'-O-methylguanosine with a 3'-phosphorothioate linkage
  modified_base 2: mod_base = OTHER; note = 2'-O-methyluridine with a 3'-phosphorothioate linkage
  modified_base 3: mod_base = OTHER; note = 2'-O-methyladenosine
  modified_base 4: mod_base = um
  modified_base 5: mod_base = OTHER; note = 2'-O-methyladenosine
  modified_base 6: mod_base = um
  modified_base 7: mod_base = um
  modified_base 8: mod_base = um
  modified_base 9: mod_base = OTHER; note = 2'-fluoroadenosine
  modified_base 10: mod_base = OTHER; note = 2'-fluorocytidine
  modified_base 11: mod_base = OTHER; note = 2'-fluorouridine
  modified_base 12: mod_base = um
  modified_base 13: mod_base = cm
  modified_base 14: mod_base = cm
  modified_base 15: mod_base = OTHER; note = 2'-O-methyladenosine
  modified_base 16: mod_base = gm
  modified_base 17: mod_base = um
  modified_base 18: mod_base = um
  modified_base 19: mod_base = OTHER; note = 2'-O-methylcytidine with a 3'-phosphorothioate linkage
  modified_base 20: mod_base = OTHER; note = 2'-O-methylcytidine with a 3'-phosphorothioate linkage
  modified_base 21: mod_base = OTHER; note = 2'-O-methyladenosine
gtatatttacttccagttcca

SEQ ID NO: 1375 - RNA, 23 nt, synthetic construct
  source 1..23: mol_type = other RNA
  modified_base 1: mod_base = OTHER; note = 2'-O-methyluridine with a 3'-phosphorothioate linkage and a 5'-phosphate substitution
  modified_base 2: mod_base = OTHER; note = 2'-fluoroguanosine with a 3'-phosphorothioate linkage
  modified_base 3: mod_base = gm
  modified_base 4: mod_base = OTHER; note = 2'-O-methyladenosine
  modified_base 5: mod_base = OTHER; note = 2'-fluoroadenosine
  modified_base 6: mod_base = cm
  modified_base 7: mod_base = OTHER; note = 2'-fluorouridine
  modified_base 8: mod_base = gm
  modified_base 9: mod_base = gm
  modified_base 10: mod_base = OTHER; note = 2'-O-methyladenosine
  modified_base 11: mod_base = OTHER; note = 2'-O-methyladenosine
  modified_base 12: mod_base = gm
  modified_base 13: mod_base = um
  modified_base 14: mod_base = OTHER; note = 2'-fluoroadenosine
  modified_base 15: mod_base = OTHER; note = 2'-O-methyladenosine
  modified_base 16: mod_base = OTHER; note = 2'-fluoroadenosine
  modified_base 17: mod_base = um
  modified_base 18: mod_base = OTHER; note = 2'-O-methyladenosine
  modified_base 19: mod_base = um
  modified_base 20: mod_base = OTHER; note = 2'-O-methyladenosine
  modified_base 21: mod_base = OTHER; note = 2'-O-methylcytidine with a 3'-phosphorothioate linkage
  modified_base 22: mod_base = OTHER; note = 2'-O-methyladenosine with a 3'-phosphorothioate linkage
  modified_base 23: mod_base = gm
tggaactggaagtaaatatacag

SEQ ID NO: 1376 - RNA, 21 nt, synthetic construct
  source 1..21: mol_type = other RNA
  modified_base 1: mod_base = OTHER; note = 2'-O-methyluridine with a 3'-phosphorothioate linkage
  modified_base 2: mod_base = OTHER; note = 2'-O-methyladenosine with a 3'-phosphorothioate linkage
  modified_base 3: mod_base = um
  modified_base 4: mod_base = OTHER; note = 2'-O-methyladenosine
  modified_base 5: mod_base = um
  modified_base 6: mod_base = um
  modified_base 7: mod_base = um
  modified_base 8: mod_base = OTHER; note = 2'-O-methyladenosine
  modified_base 9: mod_base = OTHER; note = 2'-fluorocytidine
  modified_base 10: mod_base = OTHER; note = 2'-fluorouridine
  modified_base 11: mod_base = OTHER; note = 2'-fluorouridine
  modified_base 12: mod_base = cm
  modified_base 13: mod_base = cm
  modified_base 14: mod_base = OTHER; note = 2'-O-methyladenosine
  modified_base 15: mod_base = gm
  modified_base 16: mod_base = um
  modified_base 17: mod_base = um
  modified_base 18: mod_base = cm
  modified_base 19: mod_base = OTHER; note = 2'-O-methylcytidine with a 3'-phosphorothioate linkage
  modified_base 20: mod_base = OTHER; note = 2'-O-methyladenosine with a 3'-phosphorothioate linkage
  modified_base 21: mod_base = OTHER; note = 2'-O-methyladenosine
tatatttacttccagttccaa

SEQ ID NO: 1377 - RNA, 23 nt, synthetic construct
  source 1..23: mol_type = other RNA
  modified_base 1: mod_base = OTHER; note = 2'-O-methyluridine with a 3'-phosphorothioate linkage and a 5'-phosphate substitution
  modified_base 2: mod_base = OTHER; note = 2'-fluorouridine with a 3'-phosphorothioate linkage
  modified_base 3: mod_base = gm
  modified_base 4: mod_base = gm
  modified_base 5: mod_base = OTHER; note = 2'-fluoroadenosine
  modified_base 6: mod_base = OTHER; note = 2'-O-methyladenosine
  modified_base 7: mod_base = OTHER; note = 2'-fluorocytidine
  modified_base 8: mod_base = um
  modified_base 9: mod_base = gm
  modified_base 10: mod_base = gm
  modified_base 11: mod_base = OTHER; note = 2'-O-methyladenosine
  modified_base 12: mod_base = OTHER; note = 2'-O-methyladenosine
  modified_base 13: mod_base = gm
  modified_base 14: mod_base = OTHER; note = 2'-fluorouridine
  modified_base 15: mod_base = OTHER; note = 2'-O-methyladenosine
  modified_base 16: mod_base = OTHER; note = 2'-fluoroadenosine
  modified_base 17: mod_base = OTHER; note = 2'-O-methyladenosine
  modified_base 18: mod_base = um
  modified_base 19: mod_base = OTHER; note = 2'-O-methyladenosine
  modified_base 20: mod_base = um
  modified_base 21: mod_base = OTHER; note = 2'-O-methyladenosine with a 3'-phosphorothioate linkage
  modified_base 22: mod_base = OTHER; note = 2'-O-methylcytidine with a 3'-phosphorothioate linkage
  modified_base 23: mod_base = OTHER; note = 2'-O-methyladenosine
ttggaactggaagtaaatataca

SEQ ID NO: 1378 - RNA, 21 nt, synthetic construct
  source 1..21: mol_type = other RNA
  modified_base 1: mod_base = OTHER; note = 2'-O-methyluridine with a 3'-phosphorothioate linkage
  modified_base 2: mod_base = OTHER; note = 2'-O-methyluridine with a 3'-phosphorothioate linkage
  modified_base 3: mod_base = um
  modified_base 4: mod_base = OTHER; note = 2'-O-methyladenosine
  modified_base 5: mod_base = cm
  modified_base 6: mod_base = um
  modified_base 7: mod_base = um
  modified_base 8: mod_base = cm
  modified_base 9: mod_base = OTHER; note = 2'-fluorocytidine
  modified_base 10: mod_base = OTHER; note = 2'-fluoroadenosine
  modified_base 11: mod_base = OTHER; note = 2'-fluoroguanosine
  modified_base 12: mod_base = um
  modified_base 13: mod_base = um
  modified_base 14: mod_base = cm
  modified_base 15: mod_base = cm
  modified_base 16: mod_base = OTHER; note = 2'-O-methyladenosine
  modified_base 17: mod_base = gm
  modified_base 18: mod_base = OTHER; note = 2'-O-methyladenosine
  modified_base 19: mod_base = OTHER; note = 2'-O-methyladenosine with a 3'-phosphorothioate linkage
  modified_base 20: mod_base = OTHER; note = 2'-O-methyluridine with a 3'-phosphorothioate linkage
  modified_base 21: mod_base = OTHER; note = 2'-O-methyladenosine
tttacttccagttccagaata

SEQ ID NO: 1379 - RNA, 23 nt, synthetic construct
  source 1..23: mol_type = other RNA
  modified_base 1: mod_base = OTHER; note = 2'-O-methyluridine with a 3'-phosphorothioate linkage and a 5'-phosphate substitution
  modified_base 2: mod_base = OTHER; note = 2'-fluoroadenosine with a 3'-phosphorothioate linkage
  modified_base 3: mod_base = um
  modified_base 4: mod_base = um
  modified_base 5: mod_base = OTHER; note = 2'-fluorocytidine
  modified_base 6: mod_base = um
  modified_base 7: mod_base = OTHER; note = 2'-fluoroguanosine
  modified_base 8: mod_base = gm
  modified_base 9: mod_base = OTHER; note = 2'-O-methyladenosine
  modified_base 10: mod_base = OTHER; note = 2'-O-methyladenosine
  modified_base 11: mod_base = cm
  modified_base 12: mod_base = um
  modified_base 13: mod_base = gm
  modified_base 14: mod_base = OTHER; note = 2'-fluoroguanosine
  modified_base 15: mod_base = OTHER; note = 2'-O-methyladenosine
  modified_base 16: mod_base = OTHER; note = 2'-fluoroadenosine
  modified_base 17: mod_base = gm
  modified_base 18: mod_base = um
  modified_base 19: mod_base = OTHER; note = 2'-O-methyladenosine
  modified_base 20: mod_base = OTHER; note = 2'-O-methyladenosine
  modified_base 21: mod_base = OTHER; note = 2'-O-methyladenosine with a 3'-phosphorothioate linkage
  modified_base 22: mod_base = OTHER; note = 2'-O-methyluridine with a 3'-phosphorothioate linkage
  modified_base 23: mod_base = OTHER; note = 2'-O-methyladenosine
tattctggaactggaagtaaata

SEQ ID NO: 1380 - RNA, 21 nt, synthetic construct
  source 1..21: mol_type = other RNA
  modified_base 1: mod_base = OTHER; note = 2'-O-methyluridine with a 3'-phosphorothioate linkage
  modified_base 2: mod_base = OTHER; note = 2'-O-methyladenosine with a 3'-phosphorothioate linkage
  modified_base 3: mod_base = um
  modified_base 4: mod_base = um
  modified_base 5: mod_base = um
  modified_base 6: mod_base = um
  modified_base 7: mod_base = gm
  modified_base 8: mod_base = gm
  modified_base 9: mod_base = OTHER; note = 2'-fluoroguanosine
  modified_base 10: mod_base = OTHER; note = 2'-fluorouridine
  modified_base 11: mod_base = OTHER; note = 2'-fluoroadenosine
  modified_base 12: mod_base = um
  modified_base 13: mod_base = um
  modified_base 14: mod_base = gm
  modified_base 15: mod_base = cm
  modified_base 16: mod_base = um
  modified_base 17: mod_base = gm
  modified_base 18: mod_base = gm
  modified_base 19: mod_base = OTHER; note = 2'-O-methylcytidine with a 3'-phosphorothioate linkage
  modified_base 20: mod_base = OTHER; note = 2'-O-methylcytidine with a 3'-phosphorothioate linkage
  modified_base 21: mod_base = OTHER; note = 2'-O-methyladenosine
tattttgggtattgctggcca

SEQ ID NO: 1381 - RNA, 23 nt, synthetic construct
  source 1..23: mol_type = other RNA
  modified_base 1: mod_base = OTHER; note = 2'-O-methyluridine with a 3'-phosphorothioate linkage and a 5'-phosphate substitution
  modified_base 2: mod_base = OTHER; note = 2'-fluoroguanosine with a 3'-phosphorothioate linkage
  modified_base 3: mod_base = gm
  modified_base 4: mod_base = cm
  modified_base 5: mod_base = OTHER; note = 2'-fluorocytidine
  modified_base 6: mod_base = OTHER; note = 2'-O-methyladenosine
  modified_base 7: mod_base = OTHER; note = 2'-fluoroguanosine
  modified_base 8: mod_base = cm
  modified_base 9: mod_base = OTHER; note = 2'-O-methyladenosine
  modified_base 10: mod_base = OTHER; note = 2'-O-methyladenosine
  modified_base 11: mod_base = um
  modified_base 12: mod_base = OTHER; note = 2'-O-methyladenosine
  modified_base 13: mod_base = cm
  modified_base 14: mod_base = OTHER; note = 2'-fluorocytidine
  modified_base 15: mod_base = cm
  modified_base 16: mod_base = OTHER; note = 2'-fluoroadenosine
  modified_base 17: mod_base = OTHER; note = 2'-O-methyladenosine
  modified_base 18: mod_base = OTHER; note = 2'-O-methyladenosine
  modified_base 19: mod_base = OTHER; note = 2'-O-methyladenosine
  modified_base 20: mod_base = um
  modified_base 21: mod_base = OTHER; note = 2'-O-methyladenosine with a 3'-phosphorothioate linkage
  modified_base 22: mod_base = OTHER; note = 2'-O-methyluridine with a 3'-phosphorothioate linkage
  modified_base 23: mod_base = OTHER; note = 2'-O-methyladenosine
tggccagcaatacccaaaatata

SEQ ID NO: 1382 - RNA, 21 nt, synthetic construct
  source 1..21: mol_type = other RNA
  modified_base 1: mod_base = OTHER; note = 2'-O-methyluridine with a 3'-phosphorothioate linkage
  modified_base 2: mod_base = OTHER; note = 2'-O-methyladenosine with a 3'-phosphorothioate linkage
  modified_base 3: mod_base = um
  modified_base 4: mod_base = um
  modified_base 5: mod_base = cm
  modified_base 6: mod_base = OTHER; note = 2'-O-methyladenosine
  modified_base 7: mod_base = gm
  modified_base 8: mod_base = um
  modified_base 9: mod_base = OTHER; note = 2'-fluoroadenosine
  modified_base 10: mod_base = OTHER; note = 2'-fluorocytidine
  modified_base 11: mod_base = OTHER; note = 2'-fluoroadenosine
  modified_base 12: mod_base = gm
  modified_base 13: mod_base = um
  modified_base 14: mod_base = um
  modified_base 15: mod_base = gm
  modified_base 16: mod_base = um
  modified_base 17: mod_base = cm
  modified_base 18: mod_base = OTHER; note = 2'-O-methyladenosine
  modified_base 19: mod_base = OTHER; note = 2'-O-methyluridine with a 3'-phosphorothioate linkage
  modified_base 20: mod_base = OTHER; note = 2'-O-methyluridine with a 3'-phosphorothioate linkage
  modified_base 21: mod_base = OTHER; note = 2'-O-methyladenosine
tattcagtacagttgtcatta

SEQ ID NO: 1383 - RNA, 23 nt, synthetic construct
  source 1..23: mol_type = other RNA
  modified_base 1: mod_base = OTHER; note = 2'-O-methyluridine with a 3'-phosphorothioate linkage and a 5'-phosphate substitution
  modified_base 2: mod_base = OTHER; note = 2'-fluoroadenosine with a 3'-phosphorothioate linkage
  modified_base 3: mod_base = OTHER; note = 2'-O-methyladenosine
  modified_base 4: mod_base = um
  modified_base 5: mod_base = OTHER; note = 2'-fluoroguanosine
  modified_base 6: mod_base = OTHER; note = 2'-O-methyladenosine
  modified_base 7: mod_base = OTHER; note = 2'-fluorocytidine
  modified_base 8: mod_base = OTHER; note = 2'-O-methyladenosine
  modified_base 9: mod_base = OTHER; note = 2'-O-methyladenosine
  modified_base 10: mod_base = cm
  modified_base 11: mod_base = um
  modified_base 12: mod_base = gm
  modified_base 13: mod_base = um
  modified_base 14: mod_base = OTHER; note = 2'-fluoroadenosine
  modified_base 15: mod_base = cm
  modified_base 16: mod_base = OTHER; note = 2'-fluorouridine
  modified_base 17: mod_base = gm
  modified_base 18: mod_base = OTHER; note = 2'-O-methyladenosine
  modified_base 19: mod_base = OTHER; note = 2'-O-methyladenosine
  modified_base 20: mod_base = um
  modified_base 21: mod_base = OTHER; note = 2'-O-methyladenosine with a 3'-phosphorothioate linkage
  modified_base 22: mod_base = OTHER; note = 2'-O-methylcytidine with a 3'-phosphorothioate linkage
  modified_base 23: mod_base = OTHER; note = 2'-O-methyladenosine
taatgacaactgtactgaataca

SEQ ID NO: 1384 - RNA, 21 nt, synthetic construct
  source 1..21: mol_type = other RNA
  modified_base 1: mod_base = OTHER; note = 2'-O-methyladenosine with a 3'-phosphorothioate linkage
  modified_base 2: mod_base = OTHER; note = 2'-O-methyluridine with a 3'-phosphorothioate linkage
  modified_base 3: mod_base = um
  modified_base 4: mod_base = cm
  modified_base 5: mod_base = OTHER; note = 2'-O-methyladenosine
  modified_base 6: mod_base = gm
  modified_base 7: mod_base = um
  modified_base 8: mod_base = OTHER; note = 2'-O-methyladenosine
  modified_base 9: mod_base = OTHER; note = 2'-fluorocytidine
  modified_base 10: mod_base = OTHER; note = 2'-fluoroadenosine
  modified_base 11: mod_base = OTHER; note = 2'-fluoroguanosine
  modified_base 12: mod_base = um
  modified_base 13: mod_base = um
  modified_base 14: mod_base = gm
  modified_base 15: mod_base = um
  modified_base 16: mod_base = cm
  modified_base 17: mod_base = OTHER; note = 2'-O-methyladenosine
  modified_base 18: mod_base = um
  modified_base 19: mod_base = OTHER; note = 2'-O-methyluridine with a 3'-phosphorothioate linkage
  modified_base 20: mod_base = OTHER; note = 2'-O-methylcytidine with a 3'-phosphorothioate linkage
  modified_base 21: mod_base = OTHER; note = 2'-O-methyladenosine
attcagtacagttgtcattca

SEQ ID NO: 1385 - RNA, 23 nt, synthetic construct
  source 1..23: mol_type = other RNA
  modified_base 1: mod_base = OTHER; note = 2'-O-methyluridine with a 3'-phosphorothioate linkage and a 5'-phosphate substitution
  modified_base 2: mod_base = OTHER; note = 2'-fluoroguanosine with a 3'-phosphorothioate linkage
  modified_base 3: mod_base = OTHER; note = 2'-O-methyladenosine
  modified_base 4: mod_base = OTHER; note = 2'-O-methyladenosine
  modified_base 5: mod_base = OTHER; note = 2'-fluorouridine
  modified_base 6: mod_base = gm
  modified_base 7: mod_base = OTHER; note = 2'-fluoroadenosine
  modified_base 8: mod_base = cm
  modified_base 9: mod_base = OTHER; note = 2'-O-methyladenosine
  modified_base 10: mod_base = OTHER; note = 2'-O-methyladenosine
  modified_base 11: mod_base = cm
  modified_base 12: mod_base = um
  modified_base 13: mod_base = gm
  modified_base 14: mod_base = OTHER; note = 2'-fluorouridine
  modified_base 15: mod_base = OTHER; note = 2'-O-methyladenosine
  modified_base 16: mod_base = OTHER; note = 2'-fluorocytidine
  modified_base 17: mod_base = um
  modified_base 18: mod_base = gm
  modified_base 19: mod_base = OTHER; note = 2'-O-methyladenosine
  modified_base 20: mod_base = OTHER; note = 2'-O-methyladenosine
  modified_base 21: mod_base = OTHER; note = 2'-O-methyluridine with a 3'-phosphorothioate linkage
  modified_base 22: mod_base = OTHER; note = 2'-O-methyladenosine with a 3'-phosphorothioate linkage
  modified_base 23: mod_base = cm
tgaatgacaactgtactgaatac

SEQ ID NO: 1386 - RNA, 21 nt, synthetic construct
  source 1..21: mol_type = other RNA
  modified_base 1: mod_base = OTHER; note = 2'-O-methyladenosine with a 3'-phosphorothioate linkage
  modified_base 2: mod_base = OTHER; note = 2'-O-methylguanosine with a 3'-phosphorothioate linkage
  modified_base 3: mod_base = OTHER; note = 2'-O-methyladenosine
  modified_base 4: mod_base = cm
  modified_base 5: mod_base = OTHER; note = 2'-O-methyladenosine
  modified_base 6: mod_base = OTHER; note = 2'-O-methyladenosine
  modified_base 7: mod_base = OTHER; note = 2'-O-methyladenosine
  modified_base 8: mod_base = gm
  modified_base 9: mod_base = OTHER; note = 2'-fluoroadenosine
  modified_base 10: mod_base = OTHER; note = 2'-fluoroadenosine
  modified_base 11: mod_base = OTHER; note = 2'-fluorouridine
  modified_base 12: mod_base = um
  modified_base 13: mod_base = gm
  modified_base 14: mod_base = OTHER; note = 2'-O-methyladenosine
  modified_base 15: mod_base = cm
  modified_base 16: mod_base = OTHER; note = 2'-O-methyladenosine
  modified_base 17: mod_base = gm
  modified_base 18: mod_base = gm
  modified_base 19: mod_base = OTHER; note = 2'-O-methylcytidine with a 3'-phosphorothioate linkage
  modified_base 20: mod_base = OTHER; note = 2'-O-methyluridine with a 3'-phosphorothioate linkage
  modified_base 21: mod_base = OTHER; note = 2'-O-methyladenosine
agacaaagaattgacaggcta

SEQ ID NO: 1387 - RNA, 23 nt, synthetic construct
  source 1..23: mol_type = other RNA
  modified_base 1: mod_base = OTHER; note = 2'-O-methyluridine with a 3'-phosphorothioate linkage and a 5'-phosphate substitution
  modified_base 2: mod_base = OTHER; note = 2'-fluoroadenosine with a 3'-phosphorothioate linkage
  modified_base 3: mod_base = gm
  modified_base 4: mod_base = cm
  modified_base 5: mod_base = OTHER; note = 2'-fluorocytidine
  modified_base 6: mod_base = um
  modified_base 7: mod_base = OTHER; note = 2'-fluoroguanosine
  modified_base 8: mod_base = um
  modified_base 9: mod_base = cm
  modified_base 10: mod_base = OTHER; note = 2'-O-methyladenosine
  modified_base 11: mod_base = OTHER; note = 2'-O-methyladenosine
  modified_base 12: mod_base = um
  modified_base 13: mod_base = um
  modified_base 14: mod_base = OTHER; note = 2'-fluorocytidine
  modified_base 15: mod_base = um
  modified_base 16: mod_base = OTHER; note = 2'-fluorouridine
  modified_base 17: mod_base = um
  modified_base 18: mod_base = gm
  modified_base 19: mod_base = um
  modified_base 20: mod_base = cm
  modified_base 21: mod_base = OTHER; note = 2'-O-methyluridine with a 3'-phosphorothioate linkage
  modified_base 22: mod_base = OTHER; note = 2'-O-methyladenosine with a 3'-phosphorothioate linkage
  modified_base 23: mod_base = OTHER; note = 2'-O-methyladenosine
tagcctgtcaattctttgtctaa

SEQ ID NO: 1388 - RNA, 21 nt, synthetic construct
  source 1..21: mol_type = other RNA
  modified_base 1: mod_base = OTHER; note = 2'-O-methylguanosine with a 3'-phosphorothioate linkage
  modified_base 2: mod_base = OTHER; note = 2'-O-methyladenosine with a 3'-phosphorothioate linkage
  modified_base 3: mod_base = cm
  modified_base 4: mod_base = OTHER; note = 2'-O-methyladenosine
  modified_base 5: mod_base = OTHER; note = 2'-O-methyladenosine
  modified_base 6: mod_base = OTHER; note = 2'-O-methyladenosine
  modified_base 7: mod_base = gm
  modified_base 8: mod_base = OTHER; note = 2'-O-methyladenosine
  modified_base 9: mod_base = OTHER; note = 2'-fluoroadenosine
  modified_base 10: mod_base = OTHER; note = 2'-fluorouridine
  modified_base 11: mod_base = OTHER; note = 2'-fluorouridine
  modified_base 12: mod_base = gm
  modified_base 13: mod_base = OTHER; note = 2'-O-methyladenosine
  modified_base 14: mod_base = cm
  modified_base 15: mod_base = OTHER; note = 2'-O-methyladenosine
  modified_base 16: mod_base = gm
  modified_base 17: mod_base = gm
  modified_base 18: mod_base = cm
  modified_base 19: mod_base = OTHER; note = 2'-O-methyluridine with a 3'-phosphorothioate linkage
  modified_base 20: mod_base = OTHER; note = 2'-O-methyluridine with a 3'-phosphorothioate linkage
  modified_base 21: mod_base = OTHER; note = 2'-O-methyladenosine
gacaaagaattgacaggctta

SEQ ID NO: 1389 - RNA, 23 nt, synthetic construct
  source 1..23: mol_type = other RNA
  modified_base 1: mod_base = OTHER; note = 2'-O-methyluridine with a 3'-phosphorothioate linkage and a 5'-phosphate substitution
  modified_base 2: mod_base = OTHER; note = 2'-fluoroadenosine with a 3'-phosphorothioate linkage
  modified_base 3: mod_base = OTHER; note = 2'-O-methyladenosine
  modified_base 4: mod_base = gm
  modified_base 5: mod_base = OTHER; note = 2'-fluorocytidine
  modified_base 6: mod_base = cm
  modified_base 7: mod_base = OTHER; note = 2'-fluorouridine
  modified_base 8: mod_base = gm
  modified_base 9: mod_base = um
  modified_base 10: mod_base = cm
  modified_base 11: mod_base = OTHER; note = 2'-O-methyladenosine
  modified_base 12: mod_base = OTHER; note = 2'-O-methyladenosine
  modified_base 13: mod_base = um
  modified_base 14: mod_base = OTHER; note = 2'-fluorouridine
  modified_base 15: mod_base = cm
  modified_base 16: mod_base = OTHER; note = 2'-fluorouridine
  modified_base 17: mod_base = um
  modified_base 18: mod_base = um
  modified_base 19: mod_base = gm
  modified_base 20: mod_base = um
  modified_base 21: mod_base = OTHER; note = 2'-O-methylcytidine with a 3'-phosphorothioate linkage
  modified_base 22: mod_base = OTHER; note = 2'-O-methyluridine with a 3'-phosphorothioate linkage
  modified_base 23: mod_base = OTHER; note = 2'-O-methyladenosine
taagcctgtcaattctttgtcta

SEQ ID NO: 1390 - RNA, 21 nt, synthetic construct
  source 1..21: mol_type = other RNA
  modified_base 1: mod_base = OTHER; note = 2'-O-methylguanosine with a 3'-phosphorothioate linkage
  modified_base 2: mod_base = OTHER; note = 2'-O-methylcytidine with a 3'-phosphorothioate linkage
  modified_base 3: mod_base = um
  modified_base 4: mod_base = um
  modified_base 5: mod_base = gm
  modified_base 6: mod_base = OTHER; note = 2'-O-methyladenosine
  modified_base 7: mod_base = OTHER; note = 2'-O-methyladenosine
  modified_base 8: mod_base = um
  modified_base 9: mod_base = OTHER; note = 2'-fluoroguanosine
  modified_base 10: mod_base = OTHER; note = 2'-fluoroadenosine
  modified_base 11: mod_base = OTHER; note = 2'-fluoroadenosine
  modified_base 12: mod_base = gm
  modified_base 13: mod_base = cm
  modified_base 14: mod_base = um
  modified_base 15: mod_base = um
  modified_base 16: mod_base = um
  modified_base 17: mod_base = gm
  modified_base 18: mod_base = cm
  modified_base 19: mod_base = OTHER; note = 2'-O-methylcytidine with a 3'-phosphorothioate linkage
  modified_base 20: mod_base = OTHER; note = 2'-O-methylcytidine with a 3'-phosphorothioate linkage
  modified_base 21: mod_base = OTHER; note = 2'-O-methyladenosine
gcttgaatgaagctttgccca

SEQ ID NO: 1391 - RNA, 23 nt, synthetic construct
  source 1..23: mol_type = other RNA
  modified_base 1: mod_base = OTHER; note = 2'-O-methyluridine with a 3'-phosphorothioate linkage and a 5'-phosphate substitution
  modified_base 2: mod_base = OTHER; note = 2'-fluoroguanosine with a 3'-phosphorothioate linkage
  modified_base 3: mod_base = gm
  modified_base 4: mod_base = gm
  modified_base 5: mod_base = OTHER; note = 2'-fluorocytidine
  modified_base 6: mod_base = OTHER; note = 2'-O-methyladenosine
  modified_base 7: mod_base = OTHER; note = 2'-fluoroadenosine
  modified_base 8: mod_base = OTHER; note = 2'-O-methyladenosine
  modified_base 9: mod_base = gm
  modified_base 10: mod_base = cm
  modified_base 11: mod_base = um
  modified_base 12: mod_base = um
  modified_base 13: mod_base = cm
  modified_base 14: mod_base = OTHER; note = 2'-fluoroadenosine
  modified_base 15: mod_base = um
  modified_base 16: mod_base = OTHER; note = 2'-fluorouridine
  modified_base 17: mod_base = cm
  modified_base 18: mod_base = OTHER; note = 2'-O-methyladenosine
  modified_base 19: mod_base = OTHER; note = 2'-O-methyladenosine
  modified_base 20: mod_base = gm
  modified_base 21: mod_base = OTHER; note = 2'-O-methylcytidine with a 3'-phosphorothioate linkage
  modified_base 22: mod_base = OTHER; note = 2'-O-methylcytidine with a 3'-phosphorothioate linkage
  modified_base 23: mod_base = um
tgggcaaagcttcattcaagcct

SEQ ID NO: 1392 - RNA, 21 nt, synthetic construct
  source 1..21: mol_type = other RNA
  modified_base 1: mod_base = OTHER; note = 2'-O-methylcytidine with a 3'-phosphorothioate linkage
  modified_base 2: mod_base = OTHER; note = 2'-O-methyluridine with a 3'-phosphorothioate linkage
  modified_base 3: mod_base = um
  modified_base 4: mod_base = gm
  modified_base 5: mod_base = OTHER; note = 2'-O-methyladenosine
  modified_base 6: mod_base = OTHER; note = 2'-O-methyladenosine
  modified_base 7: mod_base = um
  modified_base 8: mod_base = gm
  modified_base 9: mod_base = OTHER; note = 2'-fluoroadenosine
  modified_base 10: mod_base = OTHER; note = 2'-fluoroadenosine
  modified_base 11: mod_base = OTHER; note = 2'-fluoroguanosine
  modified_base 12: mod_base = cm
  modified_base 13: mod_base = um
  modified_base 14: mod_base = um
  modified_base 15: mod_base = um
  modified_base 16: mod_base = gm
  modified_base 17: mod_base = cm
  modified_base 18: mod_base = cm
  modified_base 19: mod_base = OTHER; note = 2'-O-methylcytidine with a 3'-phosphorothioate linkage
  modified_base 20: mod_base = OTHER; note = 2'-O-methyluridine with a 3'-phosphorothioate linkage
  modified_base 21: mod_base = OTHER; note = 2'-O-methyladenosine
cttgaatgaagctttgcccta

SEQ ID NO: 1393 - RNA, 23 nt, synthetic construct
  source 1..23: mol_type = other RNA
  modified_base 1: mod_base = OTHER; note = 2'-O-methyluridine with a 3'-phosphorothioate linkage and a 5'-phosphate substitution
  modified_base 2: mod_base = OTHER; note = 2'-fluoroadenosine with a 3'-phosphorothioate linkage
  modified_base 3: mod_base = gm
  modified_base 4: mod_base = gm
  modified_base 5: mod_base = OTHER; note = 2'-fluoroguanosine
  modified_base 6: mod_base = cm
  modified_base 7: mod_base = OTHER; note = 2'-fluoroadenosine
  modified_base 8: mod_base = OTHER; note = 2'-O-methyladenosine
  modified_base 9: mod_base = OTHER; note = 2'-O-methyladenosine
  modified_base 10: mod_base = gm
  modified_base 11: mod_base = cm
  modified_base 12: mod_base = um
  modified_base 13: mod_base = um
  modified_base 14: mod_base = OTHER; note = 2'-fluorocytidine
  modified_base 15: mod_base = OTHER; note = 2'-O-methyladenosine
  modified_base 16: mod_base = OTHER; note = 2'-fluorouridine
  modified_base 17: mod_base = um
  modified_base 18: mod_base = cm
  modified_base 19: mod_base = OTHER; note = 2'-O-methyladenosine
  modified_base 20: mod_base = OTHER; note = 2'-O-methyladenosine
  modified_base 21: mod_base = OTHER; note = 2'-O-methylguanosine with a 3'-phosphorothioate linkage
  modified_base 22: mod_base = OTHER; note = 2'-O-methylcytidine with a 3'-phosphorothioate linkage
  modified_base 23: mod_base = cm
tagggcaaagcttcattcaagcc

SEQ ID NO: 1394 - RNA, 21 nt, synthetic construct
  source 1..21: mol_type = other RNA
  modified_base 1: mod_base = OTHER; note = 2'-O-methyluridine with a 3'-phosphorothioate linkage
  modified_base 2: mod_base = OTHER; note = 2'-O-methyluridine with a 3'-phosphorothioate linkage
  modified_base 3: mod_base = gm
  modified_base 4: mod_base = OTHER; note = 2'-O-methyladenosine
  modified_base 5: mod_base = OTHER; note = 2'-O-methyladenosine
  modified_base 6: mod_base = um
  modified_base 7: mod_base = gm
  modified_base 8: mod_base = OTHER; note = 2'-O-methyladenosine
  modified_base 9: mod_base = OTHER; note = 2'-fluoroadenosine
  modified_base 10: mod_base = OTHER; note = 2'-fluoroguanosine
  modified_base 11: mod_base = OTHER; note = 2'-fluorocytidine
  modified_base 12: mod_base = um
  modified_base 13: mod_base = um
  modified_base 14: mod_base = um
  modified_base 15: mod_base = gm
  modified_base 16: mod_base = cm
  modified_base 17: mod_base = cm
  modified_base 18: mod_base = cm
  modified_base 19: mod_base = OTHER; note = 2'-O-methyluridine with a 3'-phosphorothioate linkage
  modified_base 20: mod_base = OTHER; note = 2'-O-methyluridine with a 3'-phosphorothioate linkage
  modified_base 21: mod_base = OTHER; note = 2'-O-methyladenosine
ttgaatgaagctttgccctta

SEQ ID NO: 1395 - RNA, 23 nt, synthetic construct
  source 1..23: mol_type = other RNA
  modified_base 1: mod_base = OTHER; note = 2'-O-methyluridine with a 3'-phosphorothioate linkage and a 5'-phosphate substitution
  modified_base 2: mod_base = OTHER; note = 2'-fluoroadenosine with a 3'-phosphorothioate linkage
  modified_base 3: mod_base = OTHER; note = 2'-O-methyladenosine
  modified_base 4: mod_base = gm
  modified_base 5: mod_base = OTHER; note = 2'-fluoroguanosine
  modified_base 6: mod_base = gm
  modified_base 7: mod_base = OTHER; note = 2'-fluorocytidine
  modified_base 8: mod_base = OTHER; note = 2'-O-methyladenosine
  modified_base 9: mod_base = OTHER; note = 2'-O-methyladenosine
  modified_base 10: mod_base = OTHER; note = 2'-O-methyladenosine
  modified_base 11: mod_base = gm
  modified_base 12: mod_base = cm
  modified_base 13: mod_base = um
  modified_base 14: mod_base = OTHER; note = 2'-fluorouridine
  modified_base 15: mod_base = cm
  modified_base 16: mod_base = OTHER; note = 2'-fluoroadenosine
  modified_base 17: mod_base = um
  modified_base 18: mod_base = um
  modified_base 19: mod_base = cm
  modified_base 20: mod_base = OTHER; note = 2'-O-methyladenosine
  modified_base 21: mod_base = OTHER; note = 2'-O-methyladenosine with a 3'-phosphorothioate linkage
  modified_base 22: mod_base = OTHER; note = 2'-O-methylguanosine with a 3'-phosphorothioate linkage
  modified_base 23: mod_base = cm
taagggcaaagcttcattcaagc

SEQ ID NO: 1396 - RNA, 21 nt, synthetic construct
  source 1..21: mol_type = other RNA
  modified_base 1: mod_base = OTHER; note = 2'-O-methyladenosine with a 3'-phosphorothioate linkage
  modified_base 2: mod_base = OTHER; note = 2'-O-methyluridine with a 3'-phosphorothioate linkage
  modified_base 3: mod_base = gm
  modified_base 4: mod_base = OTHER; note = 2'-O-methyladenosine
  modified_base 5: mod_base = OTHER; note = 2'-O-methyladenosine
  modified_base 6: mod_base = gm
  modified_base 7: mod_base = cm
  modified_base 8: mod_base = um
  modified_base 9: mod_base = OTHER; note = 2'-fluorouridine
  modified_base 10: mod_base = OTHER; note = 2'-fluorouridine
  modified_base 11: mod_base = OTHER; note = 2'-fluoroguanosine
  modified_base 12: mod_base = cm
  modified_base 13: mod_base = cm
  modified_base 14: mod_base = cm
  modified_base 15: mod_base = um
  modified_base 16: mod_base = um
  modified_base 17: mod_base = um
  modified_base 18: mod_base = um
  modified_base 19: mod_base = OTHER; note = 2'-O-methyluridine with a 3'-phosphorothioate linkage
  modified_base 20: mod_base = OTHER; note = 2'-O-methylcytidine with a 3'-phosphorothioate linkage
  modified_base 21: mod_base = OTHER; note = 2'-O-methyladenosine
atgaagctttgccctttttca

SEQ ID NO: 1397 - RNA, 23 nt, synthetic construct
  source 1..23: mol_type = other RNA
  modified_base 1: mod_base = OTHER; note = 2'-O-methyluridine with a 3'-phosphorothioate linkage and a 5'-phosphate substitution
  modified_base 2: mod_base = OTHER; note = 2'-fluoroguanosine with a 3'-phosphorothioate linkage
  modified_base 3: mod_base = OTHER; note = 2'-O-methyladenosine
  modified_base 4: mod_base = OTHER; note = 2'-O-methyladenosine
  modified_base 5: mod_base = OTHER; note = 2'-fluoroadenosine
  modified_base 6: mod_base = OTHER; note = 2'-O-methyladenosine
  modified_base 7: mod_base = OTHER; note = 2'-fluoroadenosine
  modified_base 8: mod_base = gm
  modified_base 9: mod_base = gm
  modified_base 10: mod_base = gm
  modified_base 11: mod_base = cm
  modified_base 12: mod_base = OTHER; note = 2'-O-methyladenosine
  modified_base 13: mod_base = OTHER; note = 2'-O-methyladenosine
  modified_base 14: mod_base = OTHER; note = 2'-fluoroadenosine
  modified_base 15: mod_base = gm
  modified_base 16: mod_base = OTHER; note = 2'-fluorocytidine
  modified_base 17: mod_base = um
  modified_base 18: mod_base = um
  modified_base 19: mod_base = cm
  modified_base 20: mod_base = OTHER; note = 2'-O-methyladenosine
  modified_base 21: mod_base = OTHER; note = 2'-O-methyluridine with a 3'-phosphorothioate linkage
  modified_base 22: mod_base = OTHER; note = 2'-O-methyluridine with a 3'-phosphorothioate linkage
  modified_base 23: mod_base = cm
tgaaaaagggcaaagcttcattc

SEQ ID NO: 1398 - RNA, 21 nt, synthetic construct
  source 1..21: mol_type = other RNA
  modified_base 1: mod_base = OTHER; note = 2'-O-methylcytidine with a 3'-phosphorothioate linkage
  modified_base 2: mod_base = OTHER; note = 2'-O-methyladenosine with a 3'-phosphorothioate linkage
  modified_base 3: mod_base = OTHER; note = 2'-O-methyladenosine
  modified_base 4: mod_base = OTHER; note = 2'-O-methyladenosine
  modified_base 5: mod_base = gm
  modified_base 6: mod_base = um
  modified_base 7: mod_base = um
  modified_base 8: mod_base = um
  modified_base 9: mod_base = OTHER; note = 2'-fluoroguanosine
  modified_base 10: mod_base = OTHER; note = 2'-fluorocytidine
  modified_base 11: mod_base = OTHER; note = 2'-fluorocytidine
  modified_base 12: mod_base = cm
  modified_base 13: mod_base = um
  modified_base 14: mod_base = cm
  modified_base 15: mod_base = OTHER; note = 2'-O-methyladenosine
  modified_base 16: mod_base = gm
  modified_base 17: mod_base = um
  modified_base 18: mod_base = um
  modified_base 19: mod_base = OTHER; note = 2'-O-methylcytidine with a 3'-phosphorothioate linkage
  modified_base 20: mod_base = OTHER; note = 2'-O-methylcytidine with a 3'-phosphorothioate linkage
  modified_base 21: mod_base = OTHER; note = 2'-O-methyladenosine
caaagtttgccctcagttcca

SEQ ID NO: 1399 - RNA, 23 nt, synthetic construct
  source 1..23: mol_type = other RNA
  modified_base 1: mod_base = OTHER; note = 2'-O-methyluridine with a 3'-phosphorothioate linkage and a 5'-phosphate substitution
  modified_base 2: mod_base = OTHER; note = 2'-fluoroguanosine with a 3'-phosphorothioate linkage
  modified_base 3: mod_base = gm
  modified_base 4: mod_base = OTHER; note = 2'-O-methyladenosine
  modified_base 5: mod_base = OTHER; note = 2'-fluoroadenosine
  modified_base 6: mod_base = cm
  modified_base 7: mod_base = OTHER; note = 2'-fluorouridine
  modified_base 8: mod_base = gm
  modified_base 9: mod_base = OTHER; note = 2'-O-methyladenosine
  modified_base 10: mod_base = gm
  modified_base 11: mod_base = gm
  modified_base 12: mod_base = gm
  modified_base 13: mod_base = cm
  modified_base 14: mod_base = OTHER; note = 2'-fluoroadenosine
  modified_base 15: mod_base = OTHER; note = 2'-O-methyladenosine
  modified_base 16: mod_base = OTHER; note = 2'-fluoroadenosine
  modified_base 17: mod_base = cm
  modified_base 18: mod_base = um
  modified_base 19: mod_base = um
  modified_base 20: mod_base = um
  modified_base 21: mod_base = OTHER; note = 2'-O-methylguanosine with a 3'-phosphorothioate linkage
  modified_base 22: mod_base = OTHER; note = 2'-O-methylcytidine with a 3'-phosphorothioate linkage
  modified_base 23: mod_base = um
tggaactgagggcaaactttgct

SEQ ID NO: 1400 - RNA, 21 nt, synthetic construct
  source 1..21: mol_type = other RNA
  modified_base 1: mod_base = OTHER; note = 2'-O-methyladenosine with a 3'-phosphorothioate linkage
  modified_base 2: mod_base = OTHER; note = 2'-O-methyladenosine with a 3'-phosphorothioate linkage
  modified_base 3: mod_base = gm
  modified_base 4: mod_base = um
  modified_base 5: mod_base = um
  modified_base 6: mod_base = um
  modified_base 7: mod_base = gm
  modified_base 8: mod_base = cm
  modified_base 9: mod_base = OTHER; note = 2'-fluorocytidine
  modified_base 10: mod_base = OTHER; note = 2'-fluorocytidine
  modified_base 11: mod_base = OTHER; note = 2'-fluorouridine
  modified_base 12: mod_base = cm
  modified_base 13: mod_base = OTHER; note = 2'-O-methyladenosine
  modified_base 14: mod_base = gm
  modified_base 15: mod_base = um
  modified_base 16: mod_base = um
  modified_base 17: mod_base = cm
  modified_base 18: mod_base = cm
  modified_base 19: mod_base = OTHER; note = 2'-O-methyladenosine with a 3'-phosphorothioate linkage
  modified_base 20: mod_base = OTHER; note = 2'-O-methyladenosine with a 3'-phosphorothioate linkage
  modified_base 21: mod_base = OTHER; note = 2'-O-methyladenosine
aagtttgccctcagttccaaa

SEQ ID NO: 1401 - RNA, 23 nt, synthetic construct
  source 1..23: mol_type = other RNA
  modified_base 1: mod_base = OTHER; note = 2'-O-methyluridine with a 3'-phosphorothioate linkage and a 5'-phosphate substitution
  modified_base 2: mod_base = OTHER; note = 2'-fluorouridine with a 3'-phosphorothioate linkage
  modified_base 3: mod_base = um
  modified_base 4: mod_base = gm
  modified_base 5: mod_base = OTHER; note = 2'-fluoroguanosine
  modified_base 6: mod_base = OTHER; note = 2'-O-methyladenosine
  modified_base 7: mod_base = OTHER; note = 2'-fluoroadenosine
  modified_base 8: mod_base = cm
  modified_base 9: mod_base = um
  modified_base 10: mod_base = gm
  modified_base 11: mod_base = OTHER; note = 2'-O-methyladenosine
  modified_base 12: mod_base = gm
  modified_base 13: mod_base = gm
  modified_base 14: mod_base = OTHER; note = 2'-fluoroguanosine
  modified_base 15: mod_base = cm
  modified_base 16: mod_base = OTHER; note = 2'-fluoroadenosine
  modified_base 17: mod_base = OTHER; note = 2'-O-methyladenosine
  modified_base 18: mod_base = OTHER; note = 2'-O-methyladenosine
  modified_base 19: mod_base = cm
  modified_base 20: mod_base = um
  modified_base 21: mod_base = OTHER; note = 2'-O-methyluridine with a 3'-phosphorothioate linkage
  modified_base 22: mod_base = OTHER; note = 2'-O-methyluridine with a 3'-phosphorothioate linkage
  modified_base 23: mod_base = gm
tttggaactgagggcaaactttg

SEQ ID NO: 1402 - RNA, 21 nt, synthetic construct
  source 1..21: mol_type = other RNA
  modified_base 1: mod_base = OTHER; note = 2'-O-methylcytidine with a 3'-phosphorothioate linkage
  modified_base 2: mod_base = OTHER; note = 2'-O-methyladenosine with a 3'-phosphorothioate linkage
  modified_base 3: mod_base = OTHER; note = 2'-O-methyladenosine
  modified_base 4: mod_base = cm
  modified_base 5: mod_base = um
  modified_base 6: mod_base = cm
  modified_base 7: mod_base = OTHER; note = 2'-O-methyladenosine
  modified_base 8: mod_base = cm
  modified_base 9: mod_base = OTHER; note = 2'-fluoroadenosine
  modified_base 10: mod_base = OTHER; note = 2'-fluoroguanosine
  modified_base 11: mod_base = OTHER; note = 2'-fluoroguanosine
  modified_base 12: mod_base = OTHER; note = 2'-O-methyladenosine
  modified_base 13: mod_base = um
  modified_base 14: mod_base = gm
  modified_base 15: mod_base = OTHER; note = 2'-O-methyladenosine
  modified_base 16: mod_base = OTHER; note = 2'-O-methyladenosine
  modified_base 17: mod_base = gm
  modified_base 18: mod_base = um
  modified_base 19: mod_base = OTHER; note = 2'-O-methyladenosine with a 3'-phosphorothioate linkage
  modified_base 20: mod_base = OTHER; note = 2'-O-methyladenosine with a 3'-phosphorothioate linkage
  modified_base 21: mod_base = OTHER; note = 2'-O-methyladenosine
caactcacaggatgaagtaaa

SEQ ID NO: 1403 - RNA, 23 nt, synthetic construct
  source 1..23: mol_type = other RNA
  modified_base 1: mod_base = OTHER; note = 2'-O-methyluridine with a 3'-phosphorothioate linkage and a 5'-phosphate substitution
  modified_base 2: mod_base = OTHER; note = 2'-fluorouridine with a 3'-phosphorothioate linkage
  modified_base 3: mod_base = um
  modified_base 4: mod_base = OTHER; note = 2'-O-methyladenosine
  modified_base 5: mod_base = OTHER; note = 2'-fluorocytidine
  modified_base 6: mod_base = um
  modified_base 7: mod_base = OTHER; note = 2'-fluorouridine
  modified_base 8: mod_base = cm
  modified_base 9: mod_base = OTHER; note = 2'-O-methyladenosine
  modified_base 10: mod_base = um
  modified_base 11: mod_base = cm
  modified_base 12: mod_base = cm
  modified_base 13: mod_base = um
  modified_base 14: mod_base = OTHER; note = 2'-fluoroguanosine
  modified_base 15: mod_base = um
  modified_base 16: mod_base = OTHER; note = 2'-fluoroguanosine
  modified_base 17: mod_base = OTHER; note = 2'-O-methyladenosine
  modified_base 18: mod_base = gm
  modified_base 19: mod_base = um
  modified_base 20: mod_base = um
  modified_base 21: mod_base = OTHER; note = 2'-O-methylguanosine with a 3'-phosphorothioate linkage
  modified_base 22: mod_base = OTHER; note = 2'-O-methylguanosine with a 3'-phosphorothioate linkage
  modified_base 23: mod_base = OTHER; note = 2'-O-methyladenosine
tttacttcatcctgtgagttgga

SEQ ID NO: 1404 - RNA, 21 nt, synthetic construct
  source 1..21: mol_type = other RNA
  modified_base 1: mod_base = OTHER; note = 2'-O-methyladenosine with a 3'-phosphorothioate linkage
  modified_base 2: mod_base = OTHER; note = 2'-O-methyladenosine with a 3'-phosphorothioate linkage
  modified_base 3: mod_base = cm
  modified_base 4: mod_base = um
  modified_base 5: mod_base = cm
  modified_base 6: mod_base = OTHER; note = 2'-O-methyladenosine
  modified_base 7: mod_base = cm
  modified_base 8: mod_base = OTHER; note = 2'-O-methyladenosine
  modified_base 9: mod_base = OTHER; note = 2'-fluoroguanosine
  modified_base 10: mod_base = OTHER; note = 2'-fluoroguanosine
  modified_base 11: mod_base = OTHER; note = 2'-fluoroadenosine
  modified_base 12: mod_base = um
  modified_base 13: mod_base = gm
  modified_base 14: mod_base = OTHER; note = 2'-O-methyladenosine
  modified_base 15: mod_base = OTHER; note = 2'-O-methyladenosine
  modified_base 16: mod_base = gm
  modified_base 17: mod_base = um
  modified_base 18: mod_base = OTHER; note = 2'-O-methyladenosine
  modified_base 19: mod_base = OTHER; note = 2'-O-methyladenosine with a 3'-phosphorothioate linkage
  modified_base 20: mod_base = OTHER; note = 2'-O-methylguanosine with a 3'-phosphorothioate linkage
  modified_base 21: mod_base = OTHER; note = 2'-O-methyladenosine
aactcacaggatgaagtaaga

SEQ ID NO: 1405 - RNA, 23 nt, synthetic construct
  source 1..23: mol_type = other RNA
  modified_base 1: mod_base = OTHER; note = 2'-O-methyluridine with a 3'-phosphorothioate linkage and a 5'-phosphate substitution
  modified_base 2: mod_base = OTHER; note = 2'-fluorocytidine with a 3'-phosphorothioate linkage
  modified_base 3: mod_base = um
  modified_base 4: mod_base = um
  modified_base 5: mod_base = OTHER; note = 2'-fluoroadenosine
  modified_base 6: mod_base = cm
  modified_base 7: mod_base = OTHER; note = 2'-fluorouridine
  modified_base 8: mod_base = um
  modified_base 9: mod_base = cm
  modified_base 10: mod_base = OTHER; note = 2'-O-methyladenosine
  modified_base 11: mod_base = um
  modified_base 12: mod_base = cm
  modified_base 13: mod_base = cm
  modified_base 14: mod_base = OTHER; note = 2'-fluorouridine
  modified_base 15: mod_base = gm
  modified_base 16: mod_base = OTHER; note = 2'-fluorouridine
  modified_base 17: mod_base = gm
  modified_base 18: mod_base = OTHER; note = 2'-O-methyladenosine
  modified_base 19: mod_base = gm
  modified_base 20: mod_base = um
  modified_base 21: mod_base = OTHER; note = 2'-O-methyluridine with a 3'-phosphorothioate linkage
  modified_base 22: mod_base = OTHER; note = 2'-O-methylguanosine with a 3'-phosphorothioate linkage
  modified_base 23: mod_base = gm
tcttacttcatcctgtgagttgg

SEQ ID NO: 1406 - RNA, 21 nt, synthetic construct
  source 1..21: mol_type = other RNA
  modified_base 1: mod_base = OTHER; note = 2'-O-methylguanosine with a 3'-phosphorothioate linkage
  modified_base 2: mod_base = OTHER; note = 2'-O-methyladenosine with a 3'-phosphorothioate linkage
  modified_base 3: mod_base = OTHER; note = 2'-O-methyladenosine
  modified_base 4: mod_base = gm
  modified_base 5: mod_base = um
  modified_base 6: mod_base = OTHER; note = 2'-O-methyladenosine
  modified_base 7: mod_base = OTHER; note = 2'-O-methyladenosine
  modified_base 8: mod_base = gm
  modified_base 9: mod_base = OTHER; note = 2'-fluoroguanosine
  modified_base 10: mod_base = OTHER; note = 2'-fluoroguanosine
  modified_base 11: mod_base = OTHER; note = 2'-fluoroadenosine
  modified_base 12: mod_base = OTHER; note = 2'-O-methyladenosine
  modified_base 13: mod_base = OTHER; note = 2'-O-methyladenosine
  modified_base 14: mod_base = OTHER; note = 2'-O-methyladenosine
  modified_base 15: mod_base = um
  modified_base 16: mod_base = OTHER; note = 2'-O-methyladenosine
  modified_base 17: mod_base = um
  modified_base 18: mod_base = um
  modified_base 19: mod_base = OTHER; note = 2'-O-methylguanosine with a 3'-phosphorothioate linkage
  modified_base 20: mod_base = OTHER; note = 2'-O-methylcytidine with a 3'-phosphorothioate linkage
  modified_base 21: mod_base = OTHER; note = 2'-O-methyladenosine
gaagtaagggaaaatattgca

SEQ ID NO: 1407 - RNA, 23 nt, synthetic construct
  source 1..23: mol_type = other RNA
  modified_base 1: mod_base = OTHER; note = 2'-O-methyluridine with a 3'-phosphorothioate linkage and a 5'-phosphate substitution
  modified_base 2: mod_base = OTHER; note = 2'-fluoroguanosine with a 3'-phosphorothioate linkage
  modified_base 3: mod_base = cm
  modified_base 4: mod_base = OTHER; note = 2'-O-methyladenosine
  modified_base 5: mod_base = OTHER; note = 2'-fluoroadenosine
  modified_base 6: mod_base = um
  modified_base 7: mod_base = OTHER; note = 2'-fluoroadenosine
  modified_base 8: mod_base = um
  modified_base 9: mod_base = um
  modified_base 10: mod_base = um
  modified_base 11: mod_base = um
  modified_base 12: mod_base = cm
  modified_base 13: mod_base = cm
  modified_base 14: mod_base = OTHER; note = 2'-fluorocytidine
  modified_base 15: mod_base = um
  modified_base 16: mod_base = OTHER; note = 2'-fluorouridine
  modified_base 17: mod_base = OTHER; note = 2'-O-methyladenosine
  modified_base 18: mod_base = cm
  modified_base 19: mod_base = um
  modified_base 20: mod_base = um
  modified_base 21: mod_base = OTHER; note = 2'-O-methylcytidine with a 3'-phosphorothioate linkage
  modified_base 22: mod_base = OTHER; note = 2'-O-methyladenosine with a 3'-phosphorothioate linkage
  modified_base 23: mod_base = um
tgcaatattttcccttacttcat

SEQ ID NO: 1408 - RNA, 21 nt, synthetic construct
  source 1..21: mol_type = other RNA
  modified_base 1: mod_base = OTHER; note = 2'-O-methyladenosine with a 3'-phosphorothioate linkage
  modified_base 2: mod_base = OTHER; note = 2'-O-methyladenosine with a 3'-phosphorothioate linkage
  modified_base 3: mod_base = gm
  modified_base 4: mod_base = um
  modified_base 5: mod_base = OTHER; note = 2'-O-methyladenosine
  modified_base 6: mod_base = OTHER; note = 2'-O-methyladenosine
  modified_base 7: mod_base = gm
  modified_base 8: mod_base = gm
  modified_base 9: mod_base = OTHER; note = 2'-fluoroguanosine
  modified_base 10: mod_base = OTHER; note = 2'-fluoroadenosine
  modified_base 11: mod_base = OTHER; note = 2'-fluoroadenosine
  modified_base 12: mod_base = OTHER; note = 2'-O-methyladenosine
  modified_base 13: mod_base = OTHER; note = 2'-O-methyladenosine
  modified_base 14: mod_base = um
  modified_base 15: mod_base = OTHER; note = 2'-O-methyladenosine
  modified_base 16: mod_base = um
  modified_base 17: mod_base = um
  modified_base 18: mod_base = gm
  modified_base 19: mod_base = OTHER; note = 2'-O-methylcytidine with a 3'-phosphorothioate linkage
  modified_base 20: mod_base = OTHER; note = 2'-O-methyluridine with a 3'-phosphorothioate linkage
  modified_base 21: mod_base = OTHER; note = 2'-O-methyladenosine
aagtaagggaaaatattgcta

SEQ ID NO: 1409 - RNA, 23 nt, synthetic construct
  source 1..23: mol_type = other RNA
  modified_base 1: mod_base = OTHER; note = 2'-O-methyluridine with a 3'-phosphorothioate linkage and a 5'-phosphate substitution
  modified_base 2: mod_base = OTHER; note = 2'-fluoroadenosine with a 3'-phosphorothioate linkage
  modified_base 3: mod_base = gm
  modified_base 4: mod_base = cm
  modified_base 5: mod_base = OTHER; note = 2'-fluoroadenosine
  modified_base 6: mod_base = OTHER; note = 2'-O-methyladenosine
  modified_base 7: mod_base = OTHER; note = 2'-fluorouridine
  modified_base 8: mod_base = OTHER; note = 2'-O-methyladenosine
  modified_base 9: mod_base = um
  modified_base 10: mod_base = um
  modified_base 11: mod_base = um
  modified_base 12: mod_base = um
  modified_base 13: mod_base = cm
  modified_base 14: mod_base = OTHER; note = 2'-fluorocytidine
  modified_base 15: mod_base = cm
  modified_base 16: mod_base = OTHER; note = 2'-fluorouridine
  modified_base 17: mod_base = um
  modified_base 18: mod_base = OTHER; note = 2'-O-methyladenosine
  modified_base 19: mod_base = cm
  modified_base 20: mod_base = um
  modified_base 21: mod_base = OTHER; note = 2'-O-methyluridine with a 3'-phosphorothioate linkage
  modified_base 22: mod_base = OTHER; note = 2'-O-methylcytidine with a 3'-phosphorothioate linkage
  modified_base 23: mod_base = OTHER; note = 2'-O-methyladenosine
tagcaatattttcccttacttca

SEQ ID NO: 1410 - RNA, 21 nt, synthetic construct
  source 1..21: mol_type = other RNA
  modified_base 1: mod_base = OTHER; note = 2'-O-methylguanosine with a 3'-phosphorothioate linkage
  modified_base 2: mod_base = OTHER; note = 2'-O-methyluridine with a 3'-phosphorothioate linkage
  modified_base 3: mod_base = OTHER; note = 2'-O-methyladenosine
  modified_base 4: mod_base = OTHER; note = 2'-O-methyladenosine
  modified_base 5: mod_base = gm
  modified_base 6: mod_base = gm
  modified_base 7: mod_base = gm
  modified_base 8: mod_base = OTHER; note = 2'-O-methyladenosine
  modified_base 9: mod_base = OTHER; note = 2'-fluoroadenosine
  modified_base 10: mod_base = OTHER; note = 2'-fluoroadenosine
  modified_base 11: mod_base = OTHER; note = 2'-fluoroadenosine
  modified_base 12: mod_base = um
  modified_base 13: mod_base = OTHER; note = 2'-O-methyladenosine
  modified_base 14: mod_base = um
  modified_base 15: mod_base = um
  modified_base 16: mod_base = gm
  modified_base 17: mod_base = cm
  modified_base 18: mod_base = um
  modified_base 19: mod_base = OTHER; note = 2'-O-methylcytidine with a 3'-phosphorothioate linkage
  modified_base 20: mod_base = OTHER; note = 2'-O-methylguanosine with a 3'-phosphorothioate linkage
  modified_base 21: mod_base = OTHER; note = 2'-O-methyladenosine
gtaagggaaaatattgctcga

SEQ ID NO: 1411 - RNA, 23 nt, synthetic construct
  source 1..23: mol_type = other RNA
  modified_base 1: mod_base = OTHER; note = 2'-O-methyluridine with a 3'-phosphorothioate linkage and a 5'-phosphate substitution
  modified_base 2: mod_base = OTHER; note = 2'-fluorocytidine with a 3'-phosphorothioate linkage
  modified_base 3: mod_base = gm
  modified_base 4: mod_base = OTHER; note = 2'-O-methyladenosine
  modified_base 5: mod_base = OTHER; note = 2'-fluoroguanosine
  modified_base 6: mod_base = cm
  modified_base 7: mod_base = OTHER; note = 2'-fluoroadenosine
  modified_base 8: mod_base = OTHER; note = 2'-O-methyladenosine
  modified_base 9: mod_base = um
  modified_base 10: mod_base = OTHER; note = 2'-O-methyladenosine
  modified_base 11: mod_base = um
  modified_base 12: mod_base = um
  modified_base 13: mod_base = um
  modified_base 14: mod_base = OTHER; note = 2'-fluorouridine
  modified_base 15: mod_base = cm
  modified_base 16: mod_base = OTHER; note = 2'-fluorocytidine
  modified_base 17: mod_base = cm
  modified_base 18: mod_base = um
  modified_base 19: mod_base = um
  modified_base 20: mod_base = OTHER; note = 2'-O-methyladenosine
  modified_base 21: mod_base = OTHER; note = 2'-O-methylcytidine with a 3'-phosphorothioate linkage
  modified_base 22: mod_base = OTHER; note = 2'-O-methyluridine with a 3'-phosphorothioate linkage
  modified_base 23: mod_base = um
tcgagcaatattttcccttactt

SEQ ID NO: 1412 - RNA, 21 nt, synthetic construct
  source 1..21: mol_type = other RNA
  modified_base 1: mod_base = OTHER; note = 2'-O-methyladenosine with a 3'-phosphorothioate linkage
  modified_base 2: mod_base = OTHER; note = 2'-O-methyladenosine with a 3'-phosphorothioate linkage
  modified_base 3: mod_base = gm
  modified_base 4: mod_base = gm
  modified_base 5: mod_base = gm
  modified_base 6: mod_base = OTHER; note = 2'-O-methyladenosine
  modified_base 7: mod_base = OTHER; note = 2'-O-methyladenosine
  modified_base 8: mod_base = OTHER; note = 2'-O-methyladenosine
  modified_base 9: mod_base = OTHER; note = 2'-fluoroadenosine
  modified_base 10: mod_base = OTHER; note = 2'-fluorouridine
  modified_base 11: mod_base = OTHER; note = 2'-fluoroadenosine
  modified_base 12: mod_base = um
  modified_base 13: mod_base = um
  modified_base 14: mod_base = gm
  modified_base 15: mod_base = cm
  modified_base 16: mod_base = um
  modified_base 17: mod_base = cm
  modified_base 18: mod_base = gm
  modified_base 19: mod_base = OTHER; note = 2'-O-methyluridine with a 3'-phosphorothioate linkage
  modified_base 20: mod_base = OTHER; note = 2'-O-methylguanosine with a 3'-phosphorothioate linkage
  modified_base 21: mod_base = OTHER; note = 2'-O-methyladenosine
aagggaaaatattgctcgtga

SEQ ID NO: 1413 - RNA, 23 nt, synthetic construct
  source 1..23: mol_type = other RNA
  modified_base 1: mod_base = OTHER; note = 2'-O-methyluridine with a 3'-phosphorothioate linkage and a 5'-phosphate substitution
  modified_base 2: mod_base = OTHER; note = 2'-fluorocytidine with a 3'-phosphorothioate linkage
  modified_base 3: mod_base = OTHER; note = 2'-O-methyladenosine
  modified_base 4: mod_base = cm
  modified_base 5: mod_base = OTHER; note = 2'-fluoroguanosine
  modified_base 6: mod_base = OTHER; note = 2'-O-methyladenosine
  modified_base 7: mod_base = OTHER; note = 2'-fluoroguanosine
  modified_base 8: mod_base = cm
  modified_base 9: mod_base = OTHER; note = 2'-O-methyladenosine
  modified_base 10: mod_base = OTHER; note = 2'-O-methyladenosine
  modified_base 11: mod_base = um
  modified_base 12: mod_base = OTHER; note = 2'-O-methyladenosine
  modified_base 13: mod_base = um
  modified_base 14: mod_base = OTHER; note = 2'-fluorouridine
  modified_base 15: mod_base = um
  modified_base 16: mod_base = OTHER; note = 2'-fluorouridine
  modified_base 17: mod_base = cm
  modified_base 18: mod_base = cm
  modified_base 19: mod_base = cm
  modified_base 20: mod_base = um
  modified_base 21: mod_base = OTHER; note = 2'-O-methyluridine with a 3'-phosphorothioate linkage
  modified_base 22: mod_base = OTHER; note = 2'-O-methyladenosine with a 3'-phosphorothioate linkage
  modified_base 23: mod_base = cm
tcacgagcaatattttcccttac

SEQ ID NO: 1414 - RNA, 21 nt, synthetic construct
  source 1..21: mol_type = other RNA
  modified_base 1: mod_base = OTHER; note = 2'-O-methyladenosine with a 3'-phosphorothioate linkage
  modified_base 2: mod_base = OTHER; note = 2'-O-methylguanosine with a 3'-phosphorothioate linkage
  modified_base 3: mod_base = gm
  modified_base 4: mod_base = gm
  modified_base 5: mod_base = OTHER; note = 2'-O-methyladenosine
  modified_base 6: mod_base = OTHER; note = 2'-O-methyladenosine
  modified_base 7: mod_base = OTHER; note = 2'-O-methyladenosine
  modified_base 8: mod_base = OTHER; note = 2'-O-methyladenosine
  modified_base 9: mod_base = OTHER; note = 2'-fluorouridine
  modified_base 10: mod_base = OTHER; note = 2'-fluoroadenosine
  modified_base 11: mod_base = OTHER; note = 2'-fluorouridine
  modified_base 12: mod_base = um
  modified_base 13: mod_base = gm
  modified_base 14: mod_base = cm
  modified_base 15: mod_base = um
  modified_base 16: mod_base = cm
  modified_base 17: mod_base = gm
  modified_base 18: mod_base = um
  modified_base 19: mod_base = OTHER; note = 2'-O-methylguanosine with a 3'-phosphorothioate linkage
  modified_base 20: mod_base = OTHER; note = 2'-O-methylguanosine with a 3'-phosphorothioate linkage
  modified_base 21: mod_base = OTHER; note = 2'-O-methyladenosine
agggaaaatattgctcgtgga

SEQ ID NO: 1415 - RNA, 23 nt, synthetic construct
  source 1..23: mol_type = other RNA
  modified_base 1: mod_base = OTHER; note = 2'-O-methyluridine with a 3'-phosphorothioate linkage and a 5'-phosphate substitution
  modified_base 2: mod_base = OTHER; note = 2'-fluorocytidine with a 3'-phosphorothioate linkage
  modified_base 3: mod_base = cm
  modified_base 4: mod_base = OTHER; note = 2'-O-methyladenosine
  modified_base 5: mod_base = OTHER; note = 2'-fluorocytidine
  modified_base 6: mod_base = gm
  modified_base 7: mod_base = OTHER; note = 2'-fluoroadenosine
  modified_base 8: mod_base = gm
  modified_base 9: mod_base = cm
  modified_base 10: mod_base = OTHER; note = 2'-O-methyladenosine
  modified_base 11: mod_base = OTHER; note = 2'-O-methyladenosine
  modified_base 12: mod_base = um
  modified_base 13: mod_base = OTHER; note = 2'-O-methyladenosine
  modified_base 14: mod_base = OTHER; note = 2'-fluorouridine
  modified_base 15: mod_base = um
  modified_base 16: mod_base = OTHER; note = 2'-fluorouridine
  modified_base 17: mod_base = um
  modified_base 18: mod_base = cm
  modified_base 19: mod_base = cm
  modified_base 20: mod_base = cm
  modified_base 21: mod_base = OTHER; note = 2'-O-methyluridine with a 3'-phosphorothioate linkage
  modified_base 22: mod_base = OTHER; note = 2'-O-methyluridine with a 3'-phosphorothioate linkage
  modified_base 23: mod_base = OTHER; note = 2'-O-methyladenosine
tccacgagcaatattttccctta

SEQ ID NO: 1416 - RNA, 21 nt, synthetic construct
  source 1..21: mol_type = other RNA
  modified_base 1: mod_base = OTHER; note = 2'-O-methylguanosine with a 3'-phosphorothioate linkage
  modified_base 2: mod_base = OTHER; note = 2'-O-methylguanosine with a 3'-phosphorothioate linkage
  modified_base 3: mod_base = gm
  modified_base 4: mod_base = OTHER; note = 2'-O-methyladenosine
  modified_base 5: mod_base = OTHER; note = 2'-O-methyladenosine
  modified_base 6: mod_base = OTHER; note = 2'-O-methyladenosine
  modified_base 7: mod_base = OTHER; note = 2'-O-methyladenosine
  modified_base 8: mod_base = um
  modified_base 9: mod_base = OTHER; note = 2'-fluoroadenosine
  modified_base 10: mod_base = OTHER; note = 2'-fluorouridine
  modified_base 11: mod_base = OTHER; note = 2'-fluorouridine
  modified_base 12: mod_base = gm
  modified_base 13: mod_base = cm
  modified_base 14: mod_base = um
  modified_base 15: mod_base = cm
  modified_base 16: mod_base = gm
  modified_base 17: mod_base = um
  modified_base 18: mod_base = gm
  modified_base 19: mod_base = OTHER; note = 2'-O-methylguanosine with a 3'-phosphorothioate linkage
  modified_base 20: mod_base = OTHER; note = 2'-O-methyladenosine with a 3'-phosphorothioate linkage
  modified_base 21: mod_base = OTHER; note = 2'-O-methyladenosine
gggaaaatattgctcgtggaa

SEQ ID NO: 1417 - RNA, 23 nt, synthetic construct
  source 1..23: mol_type = other RNA
  modified_base 1: mod_base = OTHER; note = 2'-O-methyluridine with a 3'-phosphorothioate linkage and a 5'-phosphate substitution
  modified_base 2: mod_base = OTHER; note = 2'-fluorouridine with a 3'-phosphorothioate linkage
  modified_base 3: mod_base = cm
  modified_base 4: mod_base = cm
  modified_base 5: mod_base = OTHER; note = 2'-fluoroadenosine
  modified_base 6: mod_base = cm
  modified_base 7: mod_base = OTHER; note = 2'-fluoroguanosine
  modified_base 8: mod_base = OTHER; note = 2'-O-methyladenosine
  modified_base 9: mod_base = gm
  modified_base 10: mod_base = cm
  modified_base 11: mod_base = OTHER; note = 2'-O-methyladenosine
  modified_base 12: mod_base = OTHER; note = 2'-O-methyladenosine
  modified_base 13: mod_base = um
  modified_base 14: mod_base = OTHER; note = 2'-fluoroadenosine
  modified_base 15: mod_base = um
  modified_base 16: mod_base = OTHER; note = 2'-fluorouridine
  modified_base 17: mod_base = um
  modified_base 18: mod_base = um
  modified_base 19: mod_base = cm
  modified_base 20: mod_base = cm
  modified_base 21: mod_base = OTHER; note = 2'-O-methylcytidine with a 3'-phosphorothioate linkage
  modified_base 22: mod_base = OTHER; note = 2'-O-methyluridine with a 3'-phosphorothioate linkage
  modified_base 23: mod_base = um
ttccacgagcaatattttccctt

SEQ ID NO: 1418 - RNA, 21 nt, synthetic construct
  source 1..21: mol_type = other RNA
  modified_base 1: mod_base = OTHER; note = 2'-O-methylguanosine with a 3'-phosphorothioate linkage
  modified_base 2: mod_base = OTHER; note = 2'-O-methylguanosine with a 3'-phosphorothioate linkage
  modified_base 3: mod_base = OTHER; note = 2'-O-methyladenosine
  modified_base 4: mod_base = OTHER; note = 2'-O-methyladenosine
  modified_base 5: mod_base = OTHER; note = 2'-O-methyladenosine
  modified_base 6: mod_base = OTHER; note = 2'-O-methyladenosine
  modified_base 7: mod_base = um
  modified_base 8: mod_base = OTHER; note = 2'-O-methyladenosine
  modified_base 9: mod_base = OTHER; note = 2'-fluorouridine
  modified_base 10: mod_base = OTHER; note = 2'-fluorouridine
  modified_base 11: mod_base = OTHER; note = 2'-fluoroguanosine
  modified_base 12: mod_base = cm
  modified_base 13: mod_base = um
  modified_base 14: mod_base = cm
  modified_base 15: mod_base = gm
  modified_base 16: mod_base = um
  modified_base 17: mod_base = gm
  modified_base 18: mod_base = gm
  modified_base 19: mod_base = OTHER; note = 2'-O-methyladenosine with a 3'-phosphorothioate linkage
  modified_base 20: mod_base = OTHER; note = 2'-O-methyladenosine with a 3'-phosphorothioate linkage
  modified_base 21: mod_base = OTHER; note = 2'-O-methyladenosine
ggaaaatattgctcgtggaaa

SEQ ID NO: 1419 - RNA, 23 nt, synthetic construct
  source 1..23: mol_type = other RNA
  modified_base 1: mod_base = OTHER; note = 2'-O-methyluridine with a 3'-phosphorothioate linkage and a 5'-phosphate substitution
  modified_base 2: mod_base = OTHER; note = 2'-fluorouridine with a 3'-phosphorothioate linkage
  modified_base 3: mod_base = um
  modified_base 4: mod_base = cm
  modified_base 5: mod_base = OTHER; note = 2'-fluorocytidine
  modified_base 6: mod_base = OTHER; note = 2'-O-methyladenosine
  modified_base 7: mod_base = OTHER; note = 2'-fluorocytidine
  modified_base 8: mod_base = gm
  modified_base 9: mod_base = OTHER; note = 2'-O-methyladenosine
  modified_base 10: mod_base = gm
  modified_base 11: mod_base = cm
  modified_base 12: mod_base = OTHER; note = 2'-O-methyladenosine
  modified_base 13: mod_base = OTHER; note = 2'-O-methyladenosine
  modified_base 14: mod_base = OTHER; note = 2'-fluorouridine
  modified_base 15: mod_base = OTHER; note = 2'-O-methyladenosine
  modified_base 16: mod_base = OTHER; note = 2'-fluorouridine
  modified_base 17: mod_base = um
  modified_base 18: mod_base = um
  modified_base 19: mod_base = um
  modified_base 20: mod_base = cm
  modified_base 21: mod_base = OTHER; note = 2'-O-methylcytidine with a 3'-phosphorothioate linkage
  modified_base 22: mod_base = OTHER; note = 2'-O-methylcytidine with a 3'-phosphorothioate linkage
  modified_base 23: mod_base = um
tttccacgagcaatattttccct

SEQ ID NO: 1420 - RNA, 21 nt, synthetic construct
  source 1..21: mol_type = other RNA
  modified_base 1: mod_base = OTHER; note = 2'-O-methyladenosine with a 3'-phosphorothioate linkage
  modified_base 2: mod_base = OTHER; note = 2'-O-methyladenosine with a 3'-phosphorothioate linkage
  modified_base 3: mod_base = OTHER; note = 2'-O-methyladenosine
  modified_base 4: mod_base = um
  modified_base 5: mod_base = OTHER; note = 2'-O-methyladenosine
  modified_base 6: mod_base = um
  modified_base 7: mod_base = um
  modified_base 8: mod_base = gm
  modified_base 9: mod_base = OTHER; note = 2'-fluorocytidine
  modified_base 10: mod_base = OTHER; note = 2'-fluorouridine
  modified_base 11: mod_base = OTHER; note = 2'-fluorocytidine
  modified_base 12: mod_base = gm
  modified_base 13: mod_base = um
  modified_base 14: mod_base = gm
  modified_base 15: mod_base = gm
  modified_base 16: mod_base = OTHER; note = 2'-O-methyladenosine
  modified_base 17: mod_base = OTHER; note = 2'-O-methyladenosine
  modified_base 18: mod_base = um
  modified_base 19: mod_base = OTHER; note = 2'-O-methylguanosine with a 3'-phosphorothioate linkage
  modified_base 20: mod_base = OTHER; note = 2'-O-methylguanosine with a 3'-phosphorothioate linkage
  modified_base 21: mod_base = OTHER; note = 2'-O-methyladenosine
aaatattgctcgtggaatgga

SEQ ID NO: 1421 - RNA, 23 nt, synthetic construct
  source 1..23: mol_type = other RNA
  modified_base 1: mod_base = OTHER; note = 2'-O-methyluridine with a 3'-phosphorothioate linkage and a 5'-phosphate substitution
  modified_base 2: mod_base = OTHER; note = 2'-fluorocytidine with a 3'-phosphorothioate linkage
  modified_base 3: mod_base = cm
  modified_base 4: mod_base = OTHER; note = 2'-O-methyladenosine
  modified_base 5: mod_base = OTHER; note = 2'-fluorouridine
  modified_base 6: mod_base = um
  modified_base 7: mod_base = OTHER; note = 2'-fluorocytidine
  modified_base 8: mod_base = cm
  modified_base 9: mod_base = OTHER; note = 2'-O-methyladenosine
  modified_base 10: mod_base = cm
  modified_base 11: mod_base = gm
  modified_base 12: mod_base = OTHER; note = 2'-O-methyladenosine
  modified_base 13: mod_base = gm
  modified_base 14: mod_base = OTHER; note = 2'-fluorocytidine
  modified_base 15: mod_base = OTHER; note = 2'-O-methyladenosine
  modified_base 16: mod_base = OTHER; note = 2'-fluoroadenosine
  modified_base 17: mod_base = um
  modified_base 18: mod_base = OTHER; note = 2'-O-methyladenosine
  modified_base 19: mod_base = um
  modified_base 20: mod_base = um
  modified_base 21: mod_base = OTHER; note = 2'-O-methyluridine with a 3'-phosphorothioate linkage
  modified_base 22: mod_base = OTHER; note = 2'-O-methyluridine with a 3'-phosphorothioate linkage
  modified_base 23: mod_base = cm
tccattccacgagcaatattttc

SEQ ID NO: 1422 - RNA, 21 nt, synthetic construct
  source 1..21: mol_type = other RNA
  modified_base 1: mod_base = OTHER; note = 2'-O-methyladenosine with a 3'-phosphorothioate linkage
  modified_base 2: mod_base = OTHER; note = 2'-O-methyladenosine with a 3'-phosphorothioate linkage
  modified_base 3: mod_base = um
  modified_base 4: mod_base = OTHER; note = 2'-O-methyladenosine
  modified_base 5: mod_base = um
  modified_base 6: mod_base = um
  modified_base 7: mod_base = gm
  modified_base 8: mod_base = cm
  modified_base 9: mod_base = OTHER; note = 2'-fluorouridine
  modified_base 10: mod_base = OTHER; note = 2'-fluorocytidine
  modified_base 11: mod_base = OTHER; note = 2'-fluoroguanosine
  modified_base 12: mod_base = um
  modified_base 13: mod_base = gm
  modified_base 14: mod_base = gm
  modified_base 15: mod_base = OTHER; note = 2'-O-methyladenosine
  modified_base 16: mod_base = OTHER; note = 2'-O-methyladenosine
  modified_base 17: mod_base = um
  modified_base 18: mod_base = gm
  modified_base 19: mod_base = OTHER; note = 2'-O-methylguanosine with a 3'-phosphorothioate linkage
  modified_base 20: mod_base = OTHER; note = 2'-O-methylcytidine with a 3'-phosphorothioate linkage
  modified_base 21: mod_base = OTHER; note = 2'-O-methyladenosine
aatattgctcgtggaatggca

SEQ ID NO: 1423 - RNA, 23 nt, synthetic construct
  source 1..23: mol_type = other RNA
  modified_base 1: mod_base = OTHER; note = 2'-O-methyluridine with a 3'-phosphorothioate linkage and a 5'-phosphate substitution
  modified_base 2: mod_base = OTHER; note = 2'-fluoroguanosine with a 3'-phosphorothioate linkage
  modified_base 3: mod_base = cm
  modified_base 4: mod_base = cm
  modified_base 5: mod_base = OTHER; note = 2'-fluoroadenosine
  modified_base 6: mod_base = um
  modified_base 7: mod_base = OTHER; note = 2'-fluorouridine
  modified_base 8: mod_base = cm
  modified_base 9: mod_base = cm
  modified_base 10: mod_base = OTHER; note = 2'-O-methyladenosine
  modified_base 11: mod_base = cm
  modified_base 12: mod_base = gm
  modified_base 13: mod_base = OTHER; note = 2'-O-methyladenosine
  modified_base 14: mod_base = OTHER; note = 2'-fluoroguanosine
  modified_base 15: mod_base = cm
  modified_base 16: mod_base = OTHER; note = 2'-fluoroadenosine
  modified_base 17: mod_base = OTHER; note = 2'-O-methyladenosine
  modified_base 18: mod_base = um
  modified_base 19: mod_base = OTHER; note = 2'-O-methyladenosine
  modified_base 20: mod_base = um
  modified_base 21: mod_base = OTHER; note = 2'-O-methyluridine with a 3'-phosphorothioate linkage
  modified_base 22: mod_base = OTHER; note = 2'-O-methyluridine with a 3'-phosphorothioate linkage
  modified_base 23: mod_base = um
tgccattccacgagcaatatttt

SEQ ID NO: 1424 - RNA, 21 nt, synthetic construct
  source 1..21: mol_type = other RNA
  modified_base 1: mod_base = OTHER; note = 2'-O-methyladenosine with a 3'-phosphorothioate linkage
  modified_base 2: mod_base = OTHER; note = 2'-O-methyluridine with a 3'-phosphorothioate linkage
  modified_base 3: mod_base = OTHER; note = 2'-O-methyladenosine
  modified_base 4: mod_base = um
  modified_base 5: mod_base = um
  modified_base 6: mod_base = gm
  modified_base 7: mod_base = cm
  modified_base 8: mod_base = um
  modified_base 9: mod_base = OTHER; note = 2'-fluorocytidine
  modified_base 10: mod_base = OTHER; note = 2'-fluoroguanosine
  modified_base 11: mod_base = OTHER; note = 2'-fluorouridine
  modified_base 12: mod_base = gm
  modified_base 13: mod_base = gm
  modified_base 14: mod_base = OTHER; note = 2'-O-methyladenosine
  modified_base 15: mod_base = OTHER; note = 2'-O-methyladenosine
  modified_base 16: mod_base = um
  modified_base 17: mod_base = gm
  modified_base 18: mod_base = gm
  modified_base 19: mod_base = OTHER; note = 2'-O-methylcytidine with a 3'-phosphorothioate linkage
  modified_base 20: mod_base = OTHER; note = 2'-O-methyladenosine with a 3'-phosphorothioate linkage
  modified_base 21: mod_base = OTHER; note = 2'-O-methyladenosine
atattgctcgtggaatggcaa

SEQ ID NO: 1425 - RNA, 23 nt, synthetic construct
  source 1..23: mol_type = other RNA
  modified_base 1: mod_base = OTHER; note = 2'-O-methyluridine with a 3'-phosphorothioate linkage and a 5'-phosphate substitution
  modified_base 2: mod_base = OTHER; note = 2'-fluorouridine with a 3'-phosphorothioate linkage
  modified_base 3: mod_base = gm
  modified_base 4: mod_base = cm
  modified_base 5: mod_base = OTHER; note = 2'-fluorocytidine
  modified_base 6: mod_base = OTHER; note = 2'-O-methyladenosine
  modified_base 7: mod_base = OTHER; note = 2'-fluorouridine
  modified_base 8: mod_base = um
  modified_base 9: mod_base = cm
  modified_base 10: mod_base = cm
  modified_base 11: mod_base = OTHER; note = 2'-O-methyladenosine
  modified_base 12: mod_base = cm
  modified_base 13: mod_base = gm
  modified_base 14: mod_base = OTHER; note = 2'-fluoroadenosine
  modified_base 15: mod_base = gm
  modified_base 16: mod_base = OTHER; note = 2'-fluorocytidine
  modified_base 17: mod_base = OTHER; note = 2'-O-methyladenosine
  modified_base 18: mod_base = OTHER; note = 2'-O-methyladenosine
  modified_base 19: mod_base = um
  modified_base 20: mod_base = OTHER; note = 2'-O-methyladenosine
  modified_base 21: mod_base = OTHER; note = 2'-O-methyluridine with a 3'-phosphorothioate linkage
  modified_base 22: mod_base = OTHER; note = 2'-O-methyluridine with a 3'-phosphorothioate linkage
  modified_base 23: mod_base = um
ttgccattccacgagcaatattt

SEQ ID NO: 1426 - RNA, 21 nt, synthetic construct
  source 1..21: mol_type = other RNA
  modified_base 1: mod_base = OTHER; note = 2'-O-methyluridine with a 3'-phosphorothioate linkage
  modified_base 2: mod_base = OTHER; note = 2'-O-methyladenosine with a 3'-phosphorothioate linkage
  modified_base 3: mod_base = um
  modified_base 4: mod_base = um
  modified_base 5: mod_base = gm
  modified_base 6: mod_base = cm
  modified_base 7: mod_base = um
  modified_base 8: mod_base = cm
  modified_base 9: mod_base = OTHER; note = 2'-fluoroguanosine
  modified_base 10: mod_base = OTHER; note = 2'-fluorouridine
  modified_base 11: mod_base = OTHER; note = 2'-fluoroguanosine
  modified_base 12: mod_base = gm
  modified_base 13: mod_base = OTHER; note = 2'-O-methyladenosine
  modified_base 14: mod_base = OTHER; note = 2'-O-methyladenosine
  modified_base 15: mod_base = um
  modified_base 16: mod_base = gm
  modified_base 17: mod_base = gm
  modified_base 18: mod_base = cm
  modified_base 19: mod_base = OTHER; note = 2'-O-methyladenosine with a 3'-phosphorothioate linkage
  modified_base 20: mod_base = OTHER; note = 2'-O-methyladenosine with a 3'-phosphorothioate linkage
  modified_base 21: mod_base = OTHER; note = 2'-O-methyladenosine
tattgctcgtggaatggcaaa

SEQ ID NO: 1427 - RNA, 23 nt, synthetic construct
  source 1..23: mol_type = other RNA
  modified_base 1: mod_base = OTHER; note = 2'-O-methyluridine with a 3'-phosphorothioate linkage and a 5'-phosphate substitution
  modified_base 2: mod_base = OTHER; note = 2'-fluorouridine with a 3'-phosphorothioate linkage
  modified_base 3: mod_base = um
  modified_base 4: mod_base = gm
  modified_base 5: mod_base = OTHER; note = 2'-fluorocytidine
  modified_base 6: mod_base = cm
  modified_base 7: mod_base = OTHER; note = 2'-fluoroadenosine
  modified_base 8: mod_base = um
  modified_base 9: mod_base = um
  modified_base 10: mod_base = cm
  modified_base 11: mod_base = cm
  modified_base 12: mod_base = OTHER; note = 2'-O-methyladenosine
  modified_base 13: mod_base = cm
  modified_base 14: mod_base = OTHER; note = 2'-fluoroguanosine
  modified_base 15: mod_base = OTHER; note = 2'-O-methyladenosine
  modified_base 16: mod_base = OTHER; note = 2'-fluoroguanosine
  modified_base 17: mod_base = cm
  modified_base 18: mod_base = OTHER; note = 2'-O-methyladenosine
  modified_base 19: mod_base = OTHER; note = 2'-O-methyladenosine
  modified_base 20: mod_base = um
  modified_base 21: mod_base = OTHER; note = 2'-O-methyladenosine with a 3'-phosphorothioate linkage
  modified_base 22: mod_base = OTHER; note = 2'-O-methyluridine with a 3'-phosphorothioate linkage
  modified_base 23: mod_base = um
tttgccattccacgagcaatatt

SEQ ID NO: 1428 - RNA, 21 nt, synthetic construct
  source 1..21: mol_type = other RNA
  modified_base 1: mod_base = OTHER; note = 2'-O-methyladenosine with a 3'-phosphorothioate linkage
  modified_base 2: mod_base = OTHER; note = 2'-O-methyluridine with a 3'-phosphorothioate linkage
  modified_base 3: mod_base = um
  modified_base 4: mod_base = gm
  modified_base 5: mod_base = cm
  modified_base 6: mod_base = um
  modified_base 7: mod_base = cm
  modified_base 8: mod_base = gm
  modified_base 9: mod_base = OTHER; note = 2'-fluorouridine
  modified_base 10: mod_base = OTHER; note = 2'-fluoroguanosine
  modified_base 11: mod_base = OTHER; note = 2'-fluoroguanosine
  modified_base 12: mod_base = OTHER; note = 2'-O-methyladenosine
  modified_base 13: mod_base = OTHER; note = 2'-O-methyladenosine
  modified_base 14: mod_base = um
  modified_base 15: mod_base = gm
  modified_base 16: mod_base = gm
  modified_base 17: mod_base = cm
  modified_base 18: mod_base = OTHER; note = 2'-O-methyladenosine
  modified_base 19: mod_base = OTHER; note = 2'-O-methyladenosine with a 3'-phosphorothioate linkage
  modified_base 20: mod_base = OTHER; note = 2'-O-methyluridine with a 3'-phosphorothioate linkage
  modified_base 21: mod_base = OTHER; note = 2'-O-methyladenosine
attgctcgtggaatggcaata

SEQ ID NO: 1429 - RNA, 23 nt, synthetic construct
  source 1..23: mol_type = other RNA
  modified_base 1: mod_base = OTHER; note = 2'-O-methyluridine with a 3'-phosphorothioate linkage and a 5'-phosphate substitution
  modified_base 2: mod_base = OTHER; note = 2'-fluoroadenosine with a 3'-phosphorothioate linkage
  modified_base 3: mod_base = um
  modified_base 4: mod_base = um
  modified_base 5: mod_base = OTHER; note = 2'-fluoroguanosine
  modified_base 6: mod_base = cm
  modified_base 7: mod_base = OTHER; note = 2'-fluorocytidine
  modified_base 8: mod_base = OTHER; note = 2'-O-methyladenosine
  modified_base 9: mod_base = um
  modified_base 10: mod_base = um
  modified_base 11: mod_base = cm
  modified_base 12: mod_base = cm
  modified_base 13: mod_base = OTHER; note = 2'-O-methyladenosine
  modified_base 14: mod_base = OTHER; note = 2'-fluorocytidine
  modified_base 15: mod_base = gm
  modified_base 16: mod_base = OTHER; note = 2'-fluoroadenosine
  modified_base 17: mod_base = gm
  modified_base 18: mod_base = cm
  modified_base 19: mod_base = OTHER; note = 2'-O-methyladenosine
  modified_base 20: mod_base = OTHER; note = 2'-O-methyladenosine
  modified_base 21: mod_base = OTHER; note = 2'-O-methyluridine with a 3'-phosphorothioate linkage
  modified_base 22: mod_base = OTHER; note = 2'-O-methyladenosine with a 3'-phosphorothioate linkage
  modified_base 23: mod_base = um
tattgccattccacgagcaatat

SEQ ID NO: 1430 - RNA, 21 nt, synthetic construct
  source 1..21: mol_type = other RNA
  modified_base 1: mod_base = OTHER; note = 2'-O-methyluridine with a 3'-phosphorothioate linkage
  modified_base 2: mod_base = OTHER; note = 2'-O-methyluridine with a 3'-phosphorothioate linkage
  modified_base 3: mod_base = gm
  modified_base 4: mod_base = cm
  modified_base 5: mod_base = um
  modified_base 6: mod_base = cm
  modified_base 7: mod_base = gm
  modified_base 8: mod_base = um
  modified_base 9: mod_base = OTHER; note = 2'-fluoroguanosine
  modified_base 10: mod_base = OTHER; note = 2'-fluoroguanosine
  modified_base 11: mod_base = OTHER; note = 2'-fluoroadenosine
  modified_base 12: mod_base = OTHER; note = 2'-O-methyladenosine
  modified_base 13: mod_base = um
  modified_base 14: mod_base = gm
  modified_base 15: mod_base = gm
  modified_base 16: mod_base = cm
  modified_base 17: mod_base = OTHER; note = 2'-O-methyladenosine
  modified_base 18: mod_base = OTHER; note = 2'-O-methyladenosine
  modified_base 19: mod_base = OTHER; note = 2'-O-methyluridine with a 3'-phosphorothioate linkage
  modified_base 20: mod_base = OTHER; note = 2'-O-methyluridine with a 3'-phosphorothioate linkage
  modified_base 21: mod_base = OTHER; note = 2'-O-methyladenosine
ttgctcgtggaatggcaatta

SEQ ID NO: 1431 - RNA, 23 nt, synthetic construct
  source 1..23: mol_type = other RNA
  modified_base 1: mod_base = OTHER; note = 2'-O-methyluridine with a 3'-phosphorothioate linkage and a 5'-phosphate substitution
  modified_base 2: mod_base = OTHER; note = 2'-fluoroadenosine with a 3'-phosphorothioate linkage
  modified_base 3: mod_base = OTHER; note = 2'-O-methyladenosine
  modified_base 4: mod_base = um
  modified_base 5: mod_base = OTHER; note = 2'-fluorouridine
  modified_base 6: mod_base = gm
  modified_base 7: mod_base = OTHER; note = 2'-fluorocytidine
  modified_base 8: mod_base = cm
  modified_base 9: mod_base = OTHER; note = 2'-O-methyladenosine
  modified_base 10: mod_base = um
  modified_base 11: mod_base = um
  modified_base 12: mod_base = cm
  modified_base 13: mod_base = cm
  modified_base 14: mod_base = OTHER; note = 2'-fluoroadenosine
  modified_base 15: mod_base = cm
  modified_base 16: mod_base = OTHER; note = 2'-fluoroguanosine
  modified_base 17: mod_base = OTHER; note = 2'-O-methyladenosine
  modified_base 18: mod_base = gm
  modified_base 19: mod_base = cm
  modified_base 20: mod_base = OTHER; note = 2'-O-methyladenosine
  modified_base 21: mod_base = OTHER; note = 2'-O-methyladenosine with a 3'-phosphorothioate linkage
  modified_base 22: mod_base = OTHER; note = 2'-O-methyluridine with a 3'-phosphorothioate linkage
  modified_base 23: mod_base = OTHER; note = 2'-O-methyladenosine
taattgccattccacgagcaata

SEQ ID NO: 1432 - RNA, 21 nt, synthetic construct
  source 1..21: mol_type = other RNA
  modified_base 1: mod_base = OTHER; note = 2'-O-methyluridine with a 3'-phosphorothioate linkage
  modified_base 2: mod_base = OTHER; note = 2'-O-methyluridine with a 3'-phosphorothioate linkage
  modified_base 3: mod_base = gm
  modified_base 4: mod_base = OTHER; note = 2'-O-methyladenosine
  modified_base 5: mod_base = OTHER; note = 2'-O-methyladenosine
  modified_base 6: mod_base = um
  modified_base 7: mod_base = gm
  modified_base 8: mod_base = um
  modified_base 9: mod_base = OTHER; note = 2'-fluorocytidine
  modified_base 10: mod_base = OTHER; note = 2'-fluorouridine
  modified_base 11: mod_base = OTHER; note = 2'-fluorouridine
  modified_base 12: mod_base = gm
  modified_base 13: mod_base = um
  modified_base 14: mod_base = gm
  modified_base 15: mod_base = OTHER; note = 2'-O-methyladenosine
  modified_base 16: mod_base = um
  modified_base 17: mod_base = um
  modified_base 18: mod_base = gm
  modified_base 19: mod_base = OTHER; note = 2'-O-methylguanosine with a 3'-phosphorothioate linkage
  modified_base 20: mod_base = OTHER; note = 2'-O-methyladenosine with a 3'-phosphorothioate linkage
  modified_base 21: mod_base = OTHER; note = 2'-O-methyladenosine
ttgaatgtcttgtgattggaa

SEQ ID NO: 1433 - RNA, 23 nt, synthetic construct
  source 1..23: mol_type = other RNA
  modified_base 1: mod_base = OTHER; note = 2'-O-methyluridine with a 3'-phosphorothioate linkage and a 5'-phosphate substitution
  modified_base 2: mod_base = OTHER; note = 2'-fluorouridine with a 3'-phosphorothioate linkage
  modified_base 3: mod_base = cm
  modified_base 4: mod_base = cm
  modified_base 5: mod_base = OTHER; note = 2'-fluoroadenosine
  modified_base 6: mod_base = OTHER; note = 2'-O-methyladenosine
  modified_base 7: mod_base = OTHER; note = 2'-fluorouridine
  modified_base 8: mod_base = cm
  modified_base 9: mod_base = OTHER; note = 2'-O-methyladenosine
  modified_base 10: mod_base = cm
  modified_base 11: mod_base = OTHER; note = 2'-O-methyladenosine
  modified_base 12: mod_base = OTHER; note = 2'-O-methyladenosine
  modified_base 13: mod_base = gm
  modified_base 14: mod_base = OTHER; note = 2'-fluoroadenosine
  modified_base 15: mod_base = cm
  modified_base 16: mod_base = OTHER; note = 2'-fluoroadenosine
  modified_base 17: mod_base = um
  modified_base 18: mod_base = um
  modified_base 19: mod_base = cm
  modified_base 20: mod_base = OTHER; note = 2'-O-methyladenosine
  modified_base 21: mod_base = OTHER; note = 2'-O-methyladenosine with a 3'-phosphorothioate linkage
  modified_base 22: mod_base = OTHER; note = 2'-O-methylcytidine with a 3'-phosphorothioate linkage
  modified_base 23: mod_base = OTHER; note = 2'-O-methyladenosine
ttccaatcacaagacattcaaca

SEQ ID NO: 1434 - RNA, 21 nt, synthetic construct
  source 1..21: mol_type = other RNA
  modified_base 1: mod_base = OTHER; note = 2'-O-methyluridine with a 3'-phosphorothioate linkage
  modified_base 2: mod_base = OTHER; note = 2'-O-methylguanosine with a 3'-phosphorothioate linkage
  modified_base 3: mod_base = OTHER; note = 2'-O-methyladenosine
  modified_base 4: mod_base = OTHER; note = 2'-O-methyladenosine
  modified_base 5: mod_base = um
  modified_base 6: mod_base = gm
  modified_base 7: mod_base = um
  modified_base 8: mod_base = cm
  modified_base 9: mod_base = OTHER; note = 2'-fluorouridine
  modified_base 10: mod_base = OTHER; note = 2'-fluorouridine
  modified_base 11: mod_base = OTHER; note = 2'-fluoroguanosine
  modified_base 12: mod_base = um
  modified_base 13: mod_base = gm
  modified_base 14: mod_base = OTHER; note = 2'-O-methyladenosine
  modified_base 15: mod_base = um
  modified_base 16: mod_base = um
  modified_base 17: mod_base = gm
  modified_base 18: mod_base = gm
  modified_base 19: mod_base = OTHER; note = 2'-O-methyladenosine with a 3'-phosphorothioate linkage
  modified_base 20: mod_base = OTHER; note = 2'-O-methylguanosine with a 3'-phosphorothioate linkage
  modified_base 21: mod_base = OTHER; note = 2'-O-methyladenosine
tgaatgtcttgtgattggaga

SEQ ID NO: 1435 - RNA, 23 nt, synthetic construct
  source 1..23: mol_type = other RNA
  modified_base 1: mod_base = OTHER; note = 2'-O-methyluridine with a 3'-phosphorothioate linkage and a 5'-phosphate substitution
  modified_base 2: mod_base = OTHER; note = 2'-fluorocytidine with a 3'-phosphorothioate linkage
  modified_base 3: mod_base = um
  modified_base 4: mod_base = cm
  modified_base 5: mod_base = OTHER; note = 2'-fluorocytidine
  modified_base 6: mod_base = OTHER; note = 2'-O-methyladenosine
  modified_base 7: mod_base = OTHER; note = 2'-fluoroadenosine
  modified_base 8: mod_base = um
  modified_base 9: mod_base = cm
  modified_base 10: mod_base = OTHER; note = 2'-O-methyladenosine
  modified_base 11: mod_base = cm
  modified_base 12: mod_base = OTHER; note = 2'-O-methyladenosine
  modified_base 13: mod_base = OTHER; note = 2'-O-methyladenosine
  modified_base 14: mod_base = OTHER; note = 2'-fluoroguanosine
  modified_base 15: mod_base = OTHER; note = 2'-O-methyladenosine
  modified_base 16: mod_base = OTHER; note = 2'-fluorocytidine
  modified_base 17: mod_base = OTHER; note = 2'-O-methyladenosine
  modified_base 18: mod_base = um
  modified_base 19: mod_base = um
  modified_base 20: mod_base = cm
  modified_base 21: mod_base = OTHER; note = 2'-O-methyladenosine with a 3'-phosphorothioate linkage
  modified_base 22: mod_base = OTHER; note = 2'-O-methyladenosine with a 3'-phosphorothioate linkage
  modified_base 23: mod_base = cm
tctccaatcacaagacattcaac

SEQ ID NO: 1436 - RNA, 21 nt, synthetic construct
  source 1..21: mol_type = other RNA
  modified_base 1: mod_base = OTHER; note = 2'-O-methyluridine with a 3'-phosphorothioate linkage
  modified_base 2: mod_base = OTHER; note = 2'-O-methylcytidine with a 3'-phosphorothioate linkage
  modified_base 3: mod_base = um
  modified_base 4: mod_base = um
  modified_base 5: mod_base = gm
  modified_base 6: mod_base = um
  modified_base 7: mod_base = gm
  modified_base 8: mod_base = OTHER; note = 2'-O-methyladenosine
  modified_base 9: mod_base = OTHER; note = 2'-fluorouridine
  modified_base 10: mod_base = OTHER; note = 2'-fluorouridine
  modified_base 11: mod_base = OTHER; note = 2'-fluoroguanosine
  modified_base 12: mod_base = gm
  modified_base 13: mod_base = OTHER; note = 2'-O-methyladenosine
  modified_base 14: mod_base = gm
  modified_base 15: mod_base = um
  modified_base 16: mod_base = um
  modified_base 17: mod_base = gm
  modified_base 18: mod_base = gm
  modified_base 19: mod_base = OTHER; note = 2'-O-methyluridine with a 3'-phosphorothioate linkage
  modified_base 20: mod_base = OTHER; note = 2'-O-methyladenosine with a 3'-phosphorothioate linkage
  modified_base 21: mod_base = OTHER; note = 2'-O-methyladenosine
tcttgtgattggagttggtaa

SEQ ID NO: 1437 - RNA, 23 nt, synthetic construct
  source 1..23: mol_type = other RNA
  modified_base 1: mod_base = OTHER; note = 2'-O-methyluridine with a 3'-phosphorothioate linkage and a 5'-phosphate substitution
  modified_base 2: mod_base = OTHER; note = 2'-fluorouridine with a 3'-phosphorothioate linkage
  modified_base 3: mod_base = OTHER; note = 2'-O-methyladenosine
  modified_base 4: mod_base = cm
  modified_base 5: mod_base = OTHER; note = 2'-fluorocytidine
  modified_base 6: mod_base = OTHER; note = 2'-O-methyladenosine
  modified_base 7: mod_base = OTHER; note = 2'-fluoroadenosine
  modified_base 8: mod_base = cm
  modified_base 9: mod_base = um
  modified_base 10: mod_base = cm
  modified_base 11: mod_base = cm
  modified_base 12: mod_base = OTHER; note = 2'-O-methyladenosine
  modified_base 13: mod_base = OTHER; note = 2'-O-methyladenosine
  modified_base 14: mod_base = OTHER; note = 2'-fluorouridine
  modified_base 15: mod_base = cm
  modified_base 16: mod_base = OTHER; note = 2'-fluoroadenosine
  modified_base 17: mod_base = cm
  modified_base 18: mod_base = OTHER; note = 2'-O-methyladenosine
  modified_base 19: mod_base = OTHER; note = 2'-O-methyladenosine
  modified_base 20: mod_base = gm
  modified_base 21: mod_base = OTHER; note = 2'-O-methyladenosine with a 3'-phosphorothioate linkage
  modified_base 22: mod_base = OTHER; note = 2'-O-methylcytidine with a 3'-phosphorothioate linkage
  modified_base 23: mod_base = OTHER; note = 2'-O-methyladenosine
ttaccaactccaatcacaagaca

SEQ ID NO: 1438 - RNA, 21 nt, synthetic construct
  source 1..21: mol_type = other RNA
  modified_base 1: mod_base = OTHER; note = 2'-O-methylcytidine with a 3'-phosphorothioate linkage
  modified_base 2: mod_base = OTHER; note = 2'-O-methyluridine with a 3'-phosphorothioate linkage
  modified_base 3: mod_base = um
  modified_base 4: mod_base = gm
  modified_base 5: mod_base = um
  modified_base 6: mod_base = gm
  modified_base 7: mod_base = OTHER; note = 2'-O-methyladenosine
  modified_base 8: mod_base = um
  modified_base 9: mod_base = OTHER; note = 2'-fluorouridine
  modified_base 10: mod_base = OTHER; note = 2'-fluoroguanosine
  modified_base 11: mod_base = OTHER; note = 2'-fluoroguanosine
  modified_base 12: mod_base = OTHER; note = 2'-O-methyladenosine
  modified_base 13: mod_base = gm
  modified_base 14: mod_base = um
  modified_base 15: mod_base = um
  modified_base 16: mod_base = gm
  modified_base 17: mod_base = gm
  modified_base 18: mod_base = um
  modified_base 19: mod_base = OTHER; note = 2'-O-methyladenosine with a 3'-phosphorothioate linkage
  modified_base 20: mod_base = OTHER; note = 2'-O-methylcytidine with a 3'-phosphorothioate linkage
  modified_base 21: mod_base = OTHER; note = 2'-O-methyladenosine
cttgtgattggagttggtaca

SEQ ID NO: 1439 - RNA, 23 nt, synthetic construct
  source 1..23: mol_type = other RNA
  modified_base 1: mod_base = OTHER; note = 2'-O-methyluridine with a 3'-phosphorothioate linkage and a 5'-phosphate substitution
  modified_base 2: mod_base = OTHER; note = 2'-fluoroguanosine with a 3'-phosphorothioate linkage
  modified_base 3: mod_base = um
  modified_base 4: mod_base = OTHER; note = 2'-O-methyladenosine
  modified_base 5: mod_base = OTHER; note = 2'-fluorocytidine
  modified_base 6: mod_base = cm
  modified_base 7: mod_base = OTHER; note = 2'-fluoroadenosine
  modified_base 8: mod_base = OTHER; note = 2'-O-methyladenosine
  modified_base 9: mod_base = cm
  modified_base 10: mod_base = um
  modified_base 11: mod_base = cm
  modified_base 12: mod_base = cm
  modified_base 13: mod_base = OTHER; note = 2'-O-methyladenosine
  modified_base 14: mod_base = OTHER; note = 2'-fluoroadenosine
  modified_base 15: mod_base = um
  modified_base 16: mod_base = OTHER; note = 2'-fluorocytidine
  modified_base 17: mod_base = OTHER; note = 2'-O-methyladenosine
  modified_base 18: mod_base = cm
  modified_base 19: mod_base = OTHER; note = 2'-O-methyladenosine
  modified_base 20: mod_base = OTHER; note = 2'-O-methyladenosine
  modified_base 21: mod_base = OTHER; note = 2'-O-methylguanosine with a 3'-phosphorothioate linkage
  modified_base 22: mod_base = OTHER; note = 2'-O-methyladenosine with a 3'-phosphorothioate linkage
  modified_base 23: mod_base = cm
tgtaccaactccaatcacaagac

SEQ ID NO: 1440 - RNA, 21 nt, synthetic construct
  source 1..21: mol_type = other RNA
  modified_base 1: mod_base = OTHER; note = 2'-O-methyluridine with a 3'-phosphorothioate linkage
  modified_base 2: mod_base = OTHER; note = 2'-O-methyluridine with a 3'-phosphorothioate linkage
  modified_base 3: mod_base = gm
  modified_base 4: mod_base = um
  modified_base 5: mod_base = gm
  modified_base 6: mod_base = OTHER; note = 2'-O-methyladenosine
  modified_base 7: mod_base = um
  modified_base 8: mod_base = um
  modified_base 9: mod_base = OTHER; note = 2'-fluoroguanosine
  modified_base 10: mod_base = OTHER; note = 2'-fluoroguanosine
  modified_base 11: mod_base = OTHER; note = 2'-fluoroadenosine
  modified_base 12: mod_base = gm
  modified_base 13: mod_base = um
  modified_base 14: mod_base = um
  modified_base 15: mod_base = gm
  modified_base 16: mod_base = gm
  modified_base 17: mod_base = um
  modified_base 18: mod_base = OTHER; note = 2'-O-methyladenosine
  modified_base 19: mod_base = OTHER; note = 2'-O-methylcytidine with a 3'-phosphorothioate linkage
  modified_base 20: mod_base = OTHER; note = 2'-O-methylcytidine with a 3'-phosphorothioate linkage
  modified_base 21: mod_base = OTHER; note = 2'-O-methyladenosine
ttgtgattggagttggtacca

SEQ ID NO: 1441 - RNA, 23 nt, synthetic construct
  source 1..23: mol_type = other RNA
  modified_base 1: mod_base = OTHER; note = 2'-O-methyluridine with a 3'-phosphorothioate linkage and a 5'-phosphate substitution
  modified_base 2: mod_base = OTHER; note = 2'-fluoroguanosine with a 3'-phosphorothioate linkage
  modified_base 3: mod_base = gm
  modified_base 4: mod_base = um
  modified_base 5: mod_base = OTHER; note = 2'-fluoroadenosine
  modified_base 6: mod_base = cm
  modified_base 7: mod_base = OTHER; note = 2'-fluorocytidine
  modified_base 8: mod_base = OTHER; note = 2'-O-methyladenosine
  modified_base 9: mod_base = OTHER; note = 2'-O-methyladenosine
  modified_base 10: mod_base = cm
  modified_base 11: mod_base = um
  modified_base 12: mod_base = cm
  modified_base 13: mod_base = cm
  modified_base 14: mod_base = OTHER; note = 2'-fluoroadenosine
  modified_base 15: mod_base = OTHER; note = 2'-O-methyladenosine
  modified_base 16: mod_base = OTHER; note = 2'-fluorouridine
  modified_base 17: mod_base = cm
  modified_base 18: mod_base = OTHER; note = 2'-O-methyladenosine
  modified_base 19: mod_base = cm
  modified_base 20: mod_base = OTHER; note = 2'-O-methyladenosine
  modified_base 21: mod_base = OTHER; note = 2'-O-methyladenosine with a 3'-phosphorothioate linkage
  modified_base 22: mod_base = OTHER; note = 2'-O-methylguanosine with a 3'-phosphorothioate linkage
  modified_base 23: mod_base = OTHER; note = 2'-O-methyladenosine
tggtaccaactccaatcacaaga

SEQ ID NO: 1442 - RNA, 21 nt, synthetic construct
  source 1..21: mol_type = other RNA
  modified_base 1: mod_base = OTHER; note = 2'-O-methylguanosine with a 3'-phosphorothioate linkage
  modified_base 2: mod_base = OTHER; note = 2'-O-methyluridine with a 3'-phosphorothioate linkage
  modified_base 3: mod_base = gm
  modified_base 4: mod_base = OTHER; note = 2'-O-methyladenosine
  modified_base 5: mod_base = um
  modified_base 6: mod_base = um
  modified_base 7: mod_base = gm
  modified_base 8: mod_base = gm
  modified_base 9: mod_base = OTHER; note = 2'-fluoroadenosine
  modified_base 10: mod_base = OTHER; note = 2'-fluoroguanosine
  modified_base 11: mod_base = OTHER; note = 2'-fluorouridine
  modified_base 12: mod_base = um
  modified_base 13: mod_base = gm
  modified_base 14: mod_base = gm
  modified_base 15: mod_base = um
  modified_base 16: mod_base = OTHER; note = 2'-O-methyladenosine
  modified_base 17: mod_base = cm
  modified_base 18: mod_base = cm
  modified_base 19: mod_base = OTHER; note = 2'-O-methyladenosine with a 3'-phosphorothioate linkage
  modified_base 20: mod_base = OTHER; note = 2'-O-methyluridine with a 3'-phosphorothioate linkage
  modified_base 21: mod_base = OTHER; note = 2'-O-methyladenosine
gtgattggagttggtaccata

SEQ ID NO: 1443 - RNA, 23 nt, synthetic construct
  source 1..23: mol_type = other RNA
  modified_base 1: mod_base = OTHER; note = 2'-O-methyluridine with a 3'-phosphorothioate linkage and a 5'-phosphate substitution
  modified_base 2: mod_base = OTHER; note = 2'-fluoroadenosine with a 3'-phosphorothioate linkage
  modified_base 3: mod_base = um
  modified_base 4: mod_base = gm
  modified_base 5: mod_base = OTHER; note = 2'-fluoroguanosine
  modified_base 6: mod_base = um
  modified_base 7: mod_base = OTHER; note = 2'-fluoroadenosine
  modified_base 8: mod_base = cm
  modified_base 9: mod_base = cm
  modified_base 10: mod_base = OTHER; note = 2'-O-methyladenosine
  modified_base 11: mod_base = OTHER; note = 2'-O-methyladenosine
  modified_base 12: mod_base = cm
  modified_base 13: mod_base = um
  modified_base 14: mod_base = OTHER; note = 2'-fluorocytidine
  modified_base 15: mod_base = cm
  modified_base 16: mod_base = OTHER; note = 2'-fluoroadenosine
  modified_base 17: mod_base = OTHER; note = 2'-O-methyladenosine
  modified_base 18: mod_base = um
  modified_base 19: mod_base = cm
  modified_base 20: mod_base = OTHER; note = 2'-O-methyladenosine
  modified_base 21: mod_base = OTHER; note = 2'-O-methylcytidine with a 3'-phosphorothioate linkage
  modified_base 22: mod_base = OTHER; note = 2'-O-methyladenosine with a 3'-phosphorothioate linkage
  modified_base 23: mod_base = OTHER; note = 2'-O-methyladenosine
tatggtaccaactccaatcacaa

SEQ ID NO: 1444 - RNA, 21 nt, synthetic construct
  source 1..21: mol_type = other RNA
  modified_base 1: mod_base = OTHER; note = 2'-O-methylguanosine with a 3'-phosphorothioate linkage
  modified_base 2: mod_base = OTHER; note = 2'-O-methyladenosine with a 3'-phosphorothioate linkage
  modified_base 3: mod_base = um
  modified_base 4: mod_base = um
  modified_base 5: mod_base = gm
  modified_base 6: mod_base = gm
  modified_base 7: mod_base = OTHER; note = 2'-O-methyladenosine
  modified_base 8: mod_base = gm
  modified_base 9: mod_base = OTHER; note = 2'-fluorouridine
  modified_base 10: mod_base = OTHER; note = 2'-fluorouridine
  modified_base 11: mod_base = OTHER; note = 2'-fluoroguanosine
  modified_base 12: mod_base = gm
  modified_base 13: mod_base = um
  modified_base 14: mod_base = OTHER; note = 2'-O-methyladenosine
  modified_base 15: mod_base = cm
  modified_base 16: mod_base = cm
  modified_base 17: mod_base = OTHER; note = 2'-O-methyladenosine
  modified_base 18: mod_base = um
  modified_base 19: mod_base = OTHER; note = 2'-O-methylguanosine with a 3'-phosphorothioate linkage
  modified_base 20: mod_base = OTHER; note = 2'-O-methyluridine with a 3'-phosphorothioate linkage
  modified_base 21: mod_base = OTHER; note = 2'-O-methyladenosine
gattggagttggtaccatgta

SEQ ID NO: 1445 - RNA, 23 nt, synthetic construct
  source 1..23: mol_type = other RNA
  modified_base 1: mod_base = OTHER; note = 2'-O-methyluridine with a 3'-phosphorothioate linkage and a 5'-phosphate substitution
  modified_base 2: mod_base = OTHER; note = 2'-fluoroadenosine with a 3'-phosphorothioate linkage
  modified_base 3: mod_base = cm
  modified_base 4: mod_base = OTHER; note = 2'-O-methyladenosine
  modified_base 5: mod_base = OTHER; note = 2'-fluorouridine
  modified_base 6: mod_base = gm
  modified_base 7: mod_base = OTHER; note = 2'-fluoroguanosine
  modified_base 8: mod_base = um
  modified_base 9: mod_base = OTHER; note = 2'-O-methyladenosine
  modified_base 10: mod_base = cm
  modified_base 11: mod_base = cm
  modified_base 12: mod_base = OTHER; note = 2'-O-methyladenosine
  modified_base 13: mod_base = OTHER; note = 2'-O-methyladenosine
  modified_base 14: mod_base = OTHER; note = 2'-fluorocytidine
  modified_base 15: mod_base = um
  modified_base 16: mod_base = OTHER; note = 2'-fluorocytidine
  modified_base 17: mod_base = cm
  modified_base 18: mod_base = OTHER; note = 2'-O-methyladenosine
  modified_base 19: mod_base = OTHER; note = 2'-O-methyladenosine
  modified_base 20: mod_base = um
  modified_base 21: mod_base = OTHER; note = 2'-O-methylcytidine with a 3'-phosphorothioate linkage
  modified_base 22: mod_base = OTHER; note = 2'-O-methyladenosine with a 3'-phosphorothioate linkage
  modified_base 23: mod_base = cm
tacatggtaccaactccaatcac

SEQ ID NO: 1446 - RNA, 21 nt, synthetic construct
  source 1..21: mol_type = other RNA
  modified_base 1: mod_base = OTHER; note = 2'-O-methyladenosine with a 3'-phosphorothioate linkage
  modified_base 2: mod_base = OTHER; note = 2'-O-methyluridine with a 3'-phosphorothioate linkage
  modified_base 3: mod_base = um
  modified_base 4: mod_base = gm
  modified_base 5: mod_base = gm
  modified_base 6: mod_base = OTHER; note = 2'-O-methyladenosine
  modified_base 7: mod_base = gm
  modified_base 8: mod_base = um
  modified_base 9: mod_base = OTHER; note = 2'-fluorouridine
  modified_base 10: mod_base = OTHER; note = 2'-fluoroguanosine
  modified_base 11: mod_base = OTHER; note = 2'-fluoroguanosine
  modified_base 12: mod_base = um
  modified_base 13: mod_base = OTHER; note = 2'-O-methyladenosine
  modified_base 14: mod_base = cm
  modified_base 15: mod_base = cm
  modified_base 16: mod_base = OTHER; note = 2'-O-methyladenosine
  modified_base 17: mod_base = um
  modified_base 18: mod_base = gm
  modified_base 19: mod_base = OTHER; note = 2'-O-methyluridine with a 3'-phosphorothioate linkage
  modified_base 20: mod_base = OTHER; note = 2'-O-methylcytidine with a 3'-phosphorothioate linkage
  modified_base 21: mod_base = OTHER; note = 2'-O-methyladenosine
attggagttggtaccatgtca

SEQ ID NO: 1447 - RNA, 23 nt, synthetic construct
  source 1..23: mol_type = other RNA
  modified_base 1: mod_base = OTHER; note = 2'-O-methyluridine with a 3'-phosphorothioate linkage and a 5'-phosphate substitution
  modified_base 2: mod_base = OTHER; note = 2'-fluoroguanosine with a 3'-phosphorothioate linkage
  modified_base 3: mod_base = OTHER; note = 2'-O-methyladenosine
  modified_base 4: mod_base = cm
  modified_base 5: mod_base = OTHER; note = 2'-fluoroadenosine
  modified_base 6: mod_base = um
  modified_base 7: mod_base = OTHER; note = 2'-fluoroguanosine
  modified_base 8: mod_base = gm
  modified_base 9: mod_base = um
  modified_base 10: mod_base = OTHER; note = 2'-O-methyladenosine
  modified_base 11: mod_base = cm
  modified_base 12: mod_base = cm
  modified_base 13: mod_base = OTHER; note = 2'-O-methyladenosine
  modified_base 14: mod_base = OTHER; note = 2'-fluoroadenosine
  modified_base 15: mod_base = cm
  modified_base 16: mod_base = OTHER; note = 2'-fluorouridine
  modified_base 17: mod_base = cm
  modified_base 18: mod_base = cm
  modified_base 19: mod_base = OTHER; note = 2'-O-methyladenosine
  modified_base 20: mod_base = OTHER; note = 2'-O-methyladenosine
  modified_base 21: mod_base = OTHER; note = 2'-O-methyluridine with a 3'-phosphorothioate linkage
  modified_base 22: mod_base = OTHER; note = 2'-O-methylcytidine with a 3'-phosphorothioate linkage
  modified_base 23: mod_base = OTHER; note = 2'-O-methyladenosine
tgacatggtaccaactccaatca

SEQ ID NO: 1448 - RNA, 21 nt, synthetic construct
  source 1..21: mol_type = other RNA
  modified_base 1: mod_base = OTHER; note = 2'-O-methyluridine with a 3'-phosphorothioate linkage
  modified_base 2: mod_base = OTHER; note = 2'-O-methylguanosine with a 3'-phosphorothioate linkage
  modified_base 3: mod_base = gm
  modified_base 4: mod_base = OTHER; note = 2'-O-methyladenosine
  modified_base 5: mod_base = gm
  modified_base 6: mod_base = um
  modified_base 7: mod_base = um
  modified_base 8: mod_base = gm
  modified_base 9: mod_base = OTHER; note = 2'-fluoroguanosine
  modified_base 10: mod_base = OTHER; note = 2'-fluorouridine
  modified_base 11: mod_base = OTHER; note = 2'-fluoroadenosine
  modified_base 12: mod_base = cm
  modified_base 13: mod_base = cm
  modified_base 14: mod_base = OTHER; note = 2'-O-methyladenosine
  modified_base 15: mod_base = um
  modified_base 16: mod_base = gm
  modified_base 17: mod_base = um
  modified_base 18: mod_base = cm
  modified_base 19: mod_base = OTHER; note = 2'-O-methyladenosine with a 3'-phosphorothioate linkage
  modified_base 20: mod_base = OTHER; note = 2'-O-methylguanosine with a 3'-phosphorothioate linkage
  modified_base 21: mod_base = OTHER; note = 2'-O-methyladenosine
tggagttggtaccatgtcaga

SEQ ID NO: 1449 - RNA, 23 nt, synthetic construct
  source 1..23: mol_type = other RNA
  modified_base 1: mod_base = OTHER; note = 2'-O-methyluridine with a 3'-phosphorothioate linkage and a 5'-phosphate substitution
  modified_base 2: mod_base = OTHER; note = 2'-fluorocytidine with a 3'-phosphorothioate linkage
  modified_base 3: mod_base = um
  modified_base 4: mod_base = gm
  modified_base 5: mod_base = OTHER; note = 2'-fluoroadenosine
  modified_base 6: mod_base = cm
  modified_base 7: mod_base = OTHER; note = 2'-fluoroadenosine
  modified_base 8: mod_base = um
  modified_base 9: mod_base = gm
  modified_base 10: mod_base = gm
  modified_base 11: mod_base = um
  modified_base 12: mod_base = OTHER; note = 2'-O-methyladenosine
  modified_base 13: mod_base = cm
  modified_base 14: mod_base = OTHER; note = 2'-fluorocytidine
  modified_base 15: mod_base = OTHER; note = 2'-O-methyladenosine
  modified_base 16: mod_base = OTHER; note = 2'-fluoroadenosine
  modified_base 17: mod_base = cm
  modified_base 18: mod_base = um
  modified_base 19: mod_base = cm
  modified_base 20: mod_base = cm
  modified_base 21: mod_base = OTHER; note = 2'-O-methyladenosine with a 3'-phosphorothioate linkage
  modified_base 22: mod_base = OTHER; note = 2'-O-methyladenosine with a 3'-phosphorothioate linkage
  modified_base 23: mod_base = um
tctgacatggtaccaactccaat

SEQ ID NO: 1450 - RNA, 21 nt, synthetic construct
  source 1..21: mol_type = other RNA
  modified_base 1: mod_base = OTHER; note = 2'-O-methylguanosine with a 3'-phosphorothioate linkage
  modified_base 2: mod_base = OTHER; note = 2'-O-methylguanosine with a 3'-phosphorothioate linkage
  modified_base 3: mod_base = OTHER; note = 2'-O-methyladenosine
  modified_base 4: mod_base = gm
  modified_base 5: mod_base = um
  modified_base 6: mod_base = um
  modified_base 7: mod_base = gm
  modified_base 8: mod_base = gm
  modified_base 9: mod_base = OTHER; note = 2'-fluorouridine
  modified_base 10: mod_base = OTHER; note = 2'-fluoroadenosine
  modified_base 11: mod_base = OTHER; note = 2'-fluorocytidine
  modified_base 12: mod_base = cm
  modified_base 13: mod_base = OTHER; note = 2'-O-methyladenosine
  modified_base 14: mod_base = um
  modified_base 15: mod_base = gm
  modified_base 16: mod_base = um
  modified_base 17: mod_base = cm
  modified_base 18: mod_base = OTHER; note = 2'-O-methyladenosine
  modified_base 19: mod_base = OTHER; note = 2'-O-methylguanosine with a 3'-phosphorothioate linkage
  modified_base 20: mod_base = OTHER; note = 2'-O-methylguanosine with a 3'-phosphorothioate linkage
  modified_base 21: mod_base = OTHER; note = 2'-O-methyladenosine
ggagttggtaccatgtcagga

SEQ ID NO: 1451 - RNA, 23 nt, synthetic construct
  source 1..23: mol_type = other RNA
  modified_base 1: mod_base = OTHER; note = 2'-O-methyluridine with a 3'-phosphorothioate linkage and a 5'-phosphate substitution
  modified_base 2: mod_base = OTHER; note = 2'-fluorocytidine with a 3'-phosphorothioate linkage
  modified_base 3: mod_base = cm
  modified_base 4: mod_base = um
  modified_base 5: mod_base = OTHER; note = 2'-fluoroguanosine
  modified_base 6: mod_base = OTHER; note = 2'-O-methyladenosine
  modified_base 7: mod_base = OTHER; note = 2'-fluorocytidine
  modified_base 8: mod_base = OTHER; note = 2'-O-methyladenosine
  modified_base 9: mod_base = um
  modified_base 10: mod_base = gm
  modified_base 11: mod_base = gm
  modified_base 12: mod_base = um
  modified_base 13: mod_base = OTHER; note = 2'-O-methyladenosine
  modified_base 14: mod_base = OTHER; note = 2'-fluorocytidine
  modified_base 15: mod_base = cm
  modified_base 16: mod_base = OTHER; note = 2'-fluoroadenosine
  modified_base 17: mod_base = OTHER; note = 2'-O-methyladenosine
  modified_base 18: mod_base = cm
  modified_base 19: mod_base = um
  modified_base 20: mod_base = cm
  modified_base 21: mod_base = OTHER; note = 2'-O-methylcytidine with a 3'-phosphorothioate linkage
  modified_base 22: mod_base = OTHER; note = 2'-O-methyladenosine with a 3'-phosphorothioate linkage
  modified_base 23: mod_base = OTHER; note = 2'-O-methyladenosine
tcctgacatggtaccaactccaa

SEQ ID NO: 1452 - RNA, 21 nt, synthetic construct
  source 1..21: mol_type = other RNA
  modified_base 1: mod_base = OTHER; note = 2'-O-methyluridine with a 3'-phosphorothioate linkage
  modified_base 2: mod_base = OTHER; note = 2'-O-methyladenosine with a 3'-phosphorothioate linkage
  modified_base 3: mod_base = um
  modified_base 4: mod_base = gm
  modified_base 5: mod_base = um
  modified_base 6: mod_base = gm
  modified_base 7: mod_base = cm
  modified_base 8: mod_base = um
  modified_base 9: mod_base = OTHER; note = 2'-fluoroguanosine
  modified_base 10: mod_base = OTHER; note = 2'-fluorocytidine
  modified_base 11: mod_base = OTHER; note = 2'-fluorouridine
  modified_base 12: mod_base = um
  modified_base 13: mod_base = um
  modified_base 14: mod_base = gm
  modified_base 15: mod_base = gm
  modified_base 16: mod_base = cm
  modified_base 17: mod_base = um
  modified_base 18: mod_base = gm
  modified_base 19: mod_base = OTHER; note = 2'-O-methylcytidine with a 3'-phosphorothioate linkage
  modified_base 20: mod_base = OTHER; note = 2'-O-methyladenosine with a 3'-phosphorothioate linkage
  modified_base 21: mod_base = OTHER; note = 2'-O-methyladenosine
tatgtgctgctttggctgcaa

SEQ ID NO: 1453 - RNA, 23 nt, synthetic construct
  source 1..23: mol_type = other RNA
  modified_base 1: mod_base = OTHER; note = 2'-O-methyluridine with a 3'-phosphorothioate linkage and a 5'-phosphate substitution
  modified_base 2: mod_base = OTHER; note = 2'-fluorouridine with a 3'-phosphorothioate linkage
  modified_base 3: mod_base = gm
  modified_base 4: mod_base = cm
  modified_base 5: mod_base = OTHER; note = 2'-fluoroadenosine
  modified_base 6: mod_base = gm
  modified_base 7: mod_base = OTHER; note = 2'-fluorocytidine
  modified_base 8: mod_base = cm
  modified_base 9: mod_base = OTHER; note = 2'-O-methyladenosine
  modified_base 10: mod_base = OTHER; note = 2'-O-methyladenosine
  modified_base 11: mod_base = OTHER; note = 2'-O-methyladenosine
  modified_base 12: mod_base = gm
  modified_base 13: mod_base = cm
  modified_base 14: mod_base = OTHER; note = 2'-fluoroadenosine
  modified_base 15: mod_base = gm
  modified_base 16: mod_base = OTHER; note = 2'-fluorocytidine
  modified_base 17: mod_base = OTHER; note = 2'-O-methyladenosine
  modified_base 18: mod_base = cm
  modified_base 19: mod_base = OTHER; note = 2'-O-methyladenosine
  modified_base 20: mod_base = um
  modified_base 21: mod_base = OTHER; note = 2'-O-methyladenosine with a 3'-phosphorothioate linkage
  modified_base 22: mod_base = OTHER; note = 2'-O-methyladenosine with a 3'-phosphorothioate linkage
  modified_base 23: mod_base = um
ttgcagccaaagcagcacataat

SEQ ID NO: 1454 - RNA, 21 nt, synthetic construct
  source 1..21: mol_type = other RNA
  modified_base 1: mod_base = OTHER; note = 2'-O-methyluridine with a 3'-phosphorothioate linkage
  modified_base 2: mod_base = OTHER; note = 2'-O-methyluridine with a 3'-phosphorothioate linkage
  modified_base 3: mod_base = gm
  modified_base 4: mod_base = cm
  modified_base 5: mod_base = cm
  modified_base 6: mod_base = OTHER; note = 2'-O-methyladenosine
  modified_base 7: mod_base = OTHER; note = 2'-O-methyladenosine
  modified_base 8: mod_base = cm
  modified_base 9: mod_base = OTHER; note = 2'-fluorouridine
  modified_base 10: mod_base = OTHER; note = 2'-fluoroadenosine
  modified_base 11: mod_base = OTHER; note = 2'-fluorocytidine
  modified_base 12: mod_base = um
  modified_base 13: mod_base = um
  modified_base 14: mod_base = cm
  modified_base 15: mod_base = gm
  modified_base 16: mod_base = um
  modified_base 17: mod_base = gm
  modified_base 18: mod_base = um
  modified_base 19: mod_base = OTHER; note = 2'-O-methyluridine with a 3'-phosphorothioate linkage
  modified_base 20: mod_base = OTHER; note = 2'-O-methylcytidine with a 3'-phosphorothioate linkage
  modified_base 21: mod_base = OTHER; note = 2'-O-methyladenosine
ttgccaactacttcgtgttca

SEQ ID NO: 1455 - RNA, 23 nt, synthetic construct
  source 1..23: mol_type = other RNA
  modified_base 1: mod_base = OTHER; note = 2'-O-methyluridine with a 3'-phosphorothioate linkage and a 5'-phosphate substitution
  modified_base 2: mod_base = OTHER; note = 2'-fluoroguanosine with a 3'-phosphorothioate linkage
  modified_base 3: mod_base = OTHER; note = 2'-O-methyladenosine
  modified_base 4: mod_base = OTHER; note = 2'-O-methyladenosine
  modified_base 5: mod_base = OTHER; note = 2'-fluorocytidine
  modified_base 6: mod_base = OTHER; note = 2'-O-methyladenosine
  modified_base 7: mod_base = OTHER; note = 2'-fluorocytidine
  modified_base 8: mod_base = gm
  modified_base 9: mod_base = OTHER; note = 2'-O-methyladenosine
  modified_base 10: mod_base = OTHER; note = 2'-O-methyladenosine
  modified_base 11: mod_base = gm
  modified_base 12: mod_base = um
  modified_base 13: mod_base = OTHER; note = 2'-O-methyladenosine
  modified_base 14: mod_base = OTHER; note = 2'-fluoroguanosine
  modified_base 15: mod_base = um
  modified_base 16: mod_base = OTHER; note = 2'-fluorouridine
  modified_base 17: mod_base = gm
  modified_base 18: mod_base = gm
  modified_base 19: mod_base = cm
  modified_base 20: mod_base = OTHER; note = 2'-O-methyladenosine
  modified_base 21: mod_base = OTHER; note = 2'-O-methyladenosine with a 3'-phosphorothioate linkage
  modified_base 22: mod_base = OTHER; note = 2'-O-methylguanosine with a 3'-phosphorothioate linkage
  modified_base 23: mod_base = OTHER; note = 2'-O-methyladenosine
tgaacacgaagtagttggcaaga

SEQ ID NO: 1456 - RNA, 21 nt, synthetic construct
  source 1..21: mol_type = other RNA
  modified_base 1: mod_base = OTHER; note = 2'-O-methyluridine with a 3'-phosphorothioate linkage
  modified_base 2: mod_base = OTHER; note = 2'-O-methylguanosine with a 3'-phosphorothioate linkage
  modified_base 3: mod_base = cm
  modified_base 4: mod_base = cm
  modified_base 5: mod_base = OTHER; note = 2'-O-methyladenosine
  modified_base 6: mod_base = OTHER; note = 2'-O-methyladenosine
  modified_base 7: mod_base = cm
  modified_base 8: mod_base = um
  modified_base 9: mod_base = OTHER; note = 2'-fluoroadenosine
  modified_base 10: mod_base = OTHER; note = 2'-fluorocytidine
  modified_base 11: mod_base = OTHER; note = 2'-fluorouridine
  modified_base 12: mod_base = um
  modified_base 13: mod_base = cm
  modified_base 14: mod_base = gm
  modified_base 15: mod_base = um
  modified_base 16: mod_base = gm
  modified_base 17: mod_base = um
  modified_base 18: mod_base = um
  modified_base 19: mod_base = OTHER; note = 2'-O-methylcytidine with a 3'-phosphorothioate linkage
  modified_base 20: mod_base = OTHER; note = 2'-O-methyladenosine with a 3'-phosphorothioate linkage
  modified_base 21: mod_base = OTHER; note = 2'-O-methyladenosine
tgccaactacttcgtgttcaa

SEQ ID NO: 1457 - RNA, 23 nt, synthetic construct
  source 1..23: mol_type = other RNA
  modified_base 1: mod_base = OTHER; note = 2'-O-methyluridine with a 3'-phosphorothioate linkage and a 5'-phosphate substitution
  modified_base 2: mod_base = OTHER; note = 2'-fluorouridine with a 3'-phosphorothioate linkage
  modified_base 3: mod_base = gm
  modified_base 4: mod_base = OTHER; note = 2'-O-methyladenosine
  modified_base 5: mod_base = OTHER; note = 2'-fluoroadenosine
  modified_base 6: mod_base = cm
  modified_base 7: mod_base = OTHER; note = 2'-fluoroadenosine
  modified_base 8: mod_base = cm
  modified_base 9: mod_base = gm
  modified_base 10: mod_base = OTHER; note = 2'-O-methyladenosine
  modified_base 11: mod_base = OTHER; note = 2'-O-methyladenosine
  modified_base 12: mod_base = gm
  modified_base 13: mod_base = um
  modified_base 14: mod_base = OTHER; note = 2'-fluoroadenosine
  modified_base 15: mod_base = gm
  modified_base 16: mod_base = OTHER; note = 2'-fluorouridine
  modified_base 17: mod_base = um
  modified_base 18: mod_base = gm
  modified_base 19: mod_base = gm
  modified_base 20: mod_base = cm
  modified_base 21: mod_base = OTHER; note = 2'-O-methyladenosine with a 3'-phosphorothioate linkage
  modified_base 22: mod_base = OTHER; note = 2'-O-methyladenosine with a 3'-phosphorothioate linkage
  modified_base 23: mod_base = gm
ttgaacacgaagtagttggcaag

SEQ ID NO: 1458 - RNA, 21 nt, synthetic construct
  source 1..21: mol_type = other RNA
  modified_base 1: mod_base = OTHER; note = 2'-O-methylguanosine with a 3'-phosphorothioate linkage
  modified_base 2: mod_base = OTHER; note = 2'-O-methylcytidine with a 3'-phosphorothioate linkage
  modified_base 3: mod_base = cm
  modified_base 4: mod_base = OTHER; note = 2'-O-methyladenosine
  modified_base 5: mod_base = OTHER; note = 2'-O-methyladenosine
  modified_base 6: mod_base = cm
  modified_base 7: mod_base = um
  modified_base 8: mod_base = OTHER; note = 2'-O-methyladenosine
  modified_base 9: mod_base = OTHER; note = 2'-fluorocytidine
  modified_base 10: mod_base = OTHER; note = 2'-fluorouridine
  modified_base 11: mod_base = OTHER; note = 2'-fluorouridine
  modified_base 12: mod_base = cm
  modified_base 13: mod_base = gm
  modified_base 14: mod_base = um
  modified_base 15: mod_base = gm
  modified_base 16: mod_base = um
  modified_base 17: mod_base = um
  modified_base 18: mod_base = cm
  modified_base 19: mod_base = OTHER; note = 2'-O-methyladenosine with a 3'-phosphorothioate linkage
  modified_base 20: mod_base = OTHER; note = 2'-O-methyluridine with a 3'-phosphorothioate linkage
  modified_base 21: mod_base = OTHER; note = 2'-O-methyladenosine
gccaactacttcgtgttcata

SEQ ID NO: 1459 - RNA, 23 nt, synthetic construct
  source 1..23: mol_type = other RNA
  modified_base 1: mod_base = OTHER; note = 2'-O-methyluridine with a 3'-phosphorothioate linkage and a 5'-phosphate substitution
  modified_base 2: mod_base = OTHER; note = 2'-fluoroadenosine with a 3'-phosphorothioate linkage
  modified_base 3: mod_base = um
  modified_base 4: mod_base = gm
  modified_base 5: mod_base = OTHER; note = 2'-fluoroadenosine
  modified_base 6: mod_base = OTHER; note = 2'-O-methyladenosine
  modified_base 7: mod_base = OTHER; note = 2'-fluorocytidine
  modified_base 8: mod_base = OTHER; note = 2'-O-methyladenosine
  modified_base 9: mod_base = cm
  modified_base 10: mod_base = gm
  modified_base 11: mod_base = OTHER; note = 2'-O-methyladenosine
  modified_base 12: mod_base = OTHER; note = 2'-O-methyladenosine
  modified_base 13: mod_base = gm
  modified_base 14: mod_base = OTHER; note = 2'-fluorouridine
  modified_base 15: mod_base = OTHER; note = 2'-O-methyladenosine
  modified_base 16: mod_base = OTHER; note = 2'-fluoroguanosine
  modified_base 17: mod_base = um
  modified_base 18: mod_base = um
  modified_base 19: mod_base = gm
  modified_base 20: mod_base = gm
  modified_base 21: mod_base = OTHER; note = 2'-O-methylcytidine with a 3'-phosphorothioate linkage
  modified_base 22: mod_base = OTHER; note = 2'-O-methyladenosine with a 3'-phosphorothioate linkage
  modified_base 23: mod_base = OTHER; note = 2'-O-methyladenosine
tatgaacacgaagtagttggcaa

SEQ ID NO: 1460 - RNA, 21 nt, synthetic construct
  source 1..21: mol_type = other RNA
  modified_base 1: mod_base = OTHER; note = 2'-O-methylcytidine with a 3'-phosphorothioate linkage
  modified_base 2: mod_base = OTHER; note = 2'-O-methylcytidine with a 3'-phosphorothioate linkage
  modified_base 3: mod_base = OTHER; note = 2'-O-methyladenosine
  modified_base 4: mod_base = OTHER; note = 2'-O-methyladenosine
  modified_base 5: mod_base = cm
  modified_base 6: mod_base = um
  modified_base 7: mod_base = OTHER; note = 2'-O-methyladenosine
  modified_base 8: mod_base = cm
  modified_base 9: mod_base = OTHER; note = 2'-fluorouridine
  modified_base 10: mod_base = OTHER; note = 2'-fluorouridine
  modified_base 11: mod_base = OTHER; note = 2'-fluorocytidine
  modified_base 12: mod_base = gm
  modified_base 13: mod_base = um
  modified_base 14: mod_base = gm
  modified_base 15: mod_base = um
  modified_base 16: mod_base = um
  modified_base 17: mod_base = cm
  modified_base 18: mod_base = OTHER; note = 2'-O-methyladenosine
  modified_base 19: mod_base = OTHER; note = 2'-O-methyluridine with a 3'-phosphorothioate linkage
  modified_base 20: mod_base = OTHER; note = 2'-O-methylguanosine with a 3'-phosphorothioate linkage
  modified_base 21: mod_base = OTHER; note = 2'-O-methyladenosine
ccaactacttcgtgttcatga

SEQ ID NO: 1461 - RNA, 23 nt, synthetic construct
  source 1..23: mol_type = other RNA
  modified_base 1: mod_base = OTHER; note = 2'-O-methyluridine with a 3'-phosphorothioate linkage and a 5'-phosphate substitution
  modified_base 2: mod_base = OTHER; note = 2'-fluorocytidine with a 3'-phosphorothioate linkage
  modified_base 3: mod_base = OTHER; note = 2'-O-methyladenosine
  modified_base 4: mod_base = um
  modified_base 5: mod_base = OTHER; note = 2'-fluoroguanosine
  modified_base 6: mod_base = OTHER; note = 2'-O-methyladenosine
  modified_base 7: mod_base = OTHER; note = 2'-fluoroadenosine
  modified_base 8: mod_base = cm
  modified_base 9: mod_base = OTHER; note = 2'-O-methyladenosine
  modified_base 10: mod_base = cm
  modified_base 11: mod_base = gm
  modified_base 12: mod_base = OTHER; note = 2'-O-methyladenosine
  modified_base 13: mod_base = OTHER; note = 2'-O-methyladenosine
  modified_base 14: mod_base = OTHER; note = 2'-fluoroguanosine
  modified_base 15: mod_base = um
  modified_base 16: mod_base = OTHER; note = 2'-fluoroadenosine
  modified_base 17: mod_base = gm
  modified_base 18: mod_base = um
  modified_base 19: mod_base = um
  modified_base 20: mod_base = gm
  modified_base 21: mod_base = OTHER; note = 2'-O-methylguanosine with a 3'-phosphorothioate linkage
  modified_base 22: mod_base = OTHER; note = 2'-O-methylcytidine with a 3'-phosphorothioate linkage
  modified_base 23: mod_base = OTHER; note = 2'-O-methyladenosine
tcatgaacacgaagtagttggca

SEQ ID NO: 1462 - RNA, 21 nt, synthetic construct
  source 1..21: mol_type = other RNA
  modified_base 1: mod_base = OTHER; note = 2'-O-methyladenosine with a 3'-phosphorothioate linkage
  modified_base 2: mod_base = OTHER; note = 2'-O-methyladenosine with a 3'-phosphorothioate linkage
  modified_base 3: mod_base = cm
  modified_base 4: mod_base = um
  modified_base 5: mod_base = OTHER; note = 2'-O-methyladenosine
  modified_base 6: mod_base = cm
  modified_base 7: mod_base = um
  modified_base 8: mod_base = um
  modified_base 9: mod_base = OTHER; note = 2'-fluorocytidine
  modified_base 10: mod_base = OTHER; note = 2'-fluoroguanosine
  modified_base 11: mod_base = OTHER; note = 2'-fluorouridine
  modified_base 12: mod_base = gm
  modified_base 13: mod_base = um
  modified_base 14: mod_base = um
  modified_base 15: mod_base = cm
  modified_base 16: mod_base = OTHER; note = 2'-O-methyladenosine
  modified_base 17: mod_base = um
  modified_base 18: mod_base = gm
  modified_base 19: mod_base = OTHER; note = 2'-O-methyladenosine with a 3'-phosphorothioate linkage
  modified_base 20: mod_base = OTHER; note = 2'-O-methylcytidine with a 3'-phosphorothioate linkage
  modified_base 21: mod_base = OTHER; note = 2'-O-methyladenosine
aactacttcgtgttcatgaca

SEQ ID NO: 1463 - RNA, 23 nt, synthetic construct
  source 1..23: mol_type = other RNA
  modified_base 1: mod_base = OTHER; note = 2'-O-methyluridine with a 3'-phosphorothioate linkage and a 5'-phosphate substitution
  modified_base 2: mod_base = OTHER; note = 2'-fluoroguanosine with a 3'-phosphorothioate linkage
  modified_base 3: mod_base = um
  modified_base 4: mod_base = cm
  modified_base 5: mod_base = OTHER; note = 2'-fluoroadenosine
  modified_base 6: mod_base = um
  modified_base 7: mod_base = OTHER; note = 2'-fluoroguanosine
  modified_base 8: mod_base = OTHER; note = 2'-O-methyladenosine
  modified_base 9: mod_base = OTHER; note = 2'-O-methyladenosine
  modified_base 10: mod_base = cm
  modified_base 11: mod_base = OTHER; note = 2'-O-methyladenosine
  modified_base 12: mod_base = cm
  modified_base 13: mod_base = gm
  modified_base 14: mod_base = OTHER; note = 2'-fluoroadenosine
  modified_base 15: mod_base = OTHER; note = 2'-O-methyladenosine
  modified_base 16: mod_base = OTHER; note = 2'-fluoroguanosine
  modified_base 17: mod_base = um
  modified_base 18: mod_base = OTHER; note = 2'-O-methyladenosine
  modified_base 19: mod_base = gm
  modified_base 20: mod_base = um
  modified_base 21: mod_base = OTHER; note = 2'-O-methyluridine with a 3'-phosphorothioate linkage
  modified_base 22: mod_base = OTHER; note = 2'-O-methylguanosine with a 3'-phosphorothioate linkage
  modified_base 23: mod_base = gm
tgtcatgaacacgaagtagttgg

SEQ ID NO: 1464 - RNA, 21 nt, synthetic construct
  source 1..21: mol_type = other RNA
  modified_base 1: mod_base = OTHER; note = 2'-O-methyladenosine with a 3'-phosphorothioate linkage
  modified_base 2: mod_base = OTHER; note = 2'-O-methyluridine with a 3'-phosphorothioate linkage
  modified_base 3: mod_base = um
  modified_base 4: mod_base = OTHER; note = 2'-O-methyladenosine
  modified_base 5: mod_base = gm
  modified_base 6: mod_base = OTHER; note = 2'-O-methyladenosine
  modified_base 7: mod_base = gm
  modified_base 8: mod_base = cm
  modified_base 9: mod_base = OTHER; note = 2'-fluorouridine
  modified_base 10: mod_base = OTHER; note = 2'-fluorouridine
  modified_base 11: mod_base = OTHER; note = 2'-fluorouridine
  modified_base 12: mod_base = cm
  modified_base 13: mod_base = um
  modified_base 14: mod_base = cm
  modified_base 15: mod_base = gm
  modified_base 16: mod_base = gm
  modified_base 17: mod_base = gm
  modified_base 18: mod_base = OTHER; note = 2'-O-methyladenosine
  modified_base 19: mod_base = OTHER; note = 2'-O-methyladenosine with a 3'-phosphorothioate linkage
  modified_base 20: mod_base = OTHER; note = 2'-O-methyladenosine with a 3'-phosphorothioate linkage
  modified_base 21: mod_base = OTHER; note = 2'-O-methyladenosine
attagagctttctcgggaaaa

SEQ ID NO: 1465 - RNA, 23 nt, synthetic construct
  source 1..23: mol_type = other RNA
  modified_base 1: mod_base = OTHER; note = 2'-O-methyluridine with a 3'-phosphorothioate linkage and a 5'-phosphate substitution
  modified_base 2: mod_base = OTHER; note = 2'-fluorouridine with a 3'-phosphorothioate linkage
  modified_base 3: mod_base = um
  modified_base 4: mod_base = um
  modified_base 5: mod_base = OTHER; note = 2'-fluorocytidine
  modified_base 6: mod_base = cm
  modified_base 7: mod_base = OTHER; note = 2'-fluorocytidine
  modified_base 8: mod_base = gm
  modified_base 9: mod_base = OTHER; note = 2'-O-methyladenosine
  modified_base 10: mod_base = gm
  modified_base 11: mod_base = OTHER; note = 2'-O-methyladenosine
  modified_base 12: mod_base = OTHER; note = 2'-O-methyladenosine
  modified_base 13: mod_base = OTHER; note = 2'-O-methyladenosine
  modified_base 14: mod_base = OTHER; note = 2'-fluoroguanosine
  modified_base 15: mod_base = cm
  modified_base 16: mod_base = OTHER; note = 2'-fluorouridine
  modified_base 17: mod_base = cm
  modified_base 18: mod_base = um
  modified_base 19: mod_base = OTHER; note = 2'-O-methyladenosine
  modified_base 20: mod_base = OTHER; note = 2'-O-methyladenosine
  modified_base 21: mod_base = OTHER; note = 2'-O-methyluridine with a 3'-phosphorothioate linkage
  modified_base 22: mod_base = OTHER; note = 2'-O-methyladenosine with a 3'-phosphorothioate linkage
  modified_base 23: mod_base = cm
ttttcccgagaaagctctaatac

SEQ ID NO: 1466 - RNA, 21 nt, synthetic construct
  source 1..21: mol_type = other RNA
  modified_base 1: mod_base = OTHER; note = 2'-O-methyluridine with a 3'-phosphorothioate linkage
  modified_base 2: mod_base = OTHER; note = 2'-O-methyluridine with a 3'-phosphorothioate linkage
  modified_base 3: mod_base = OTHER; note = 2'-O-methyladenosine
  modified_base 4: mod_base = gm
  modified_base 5: mod_base = OTHER; note = 2'-O-methyladenosine
  modified_base 6: mod_base = gm
  modified_base 7: mod_base = cm
  modified_base 8: mod_base = um
  modified_base 9: mod_base = OTHER; note = 2'-fluorouridine
  modified_base 10: mod_base = OTHER; note = 2'-fluorouridine
  modified_base 11: mod_base = OTHER; note = 2'-fluorocytidine
  modified_base 12: mod_base = um
  modified_base 13: mod_base = cm
  modified_base 14: mod_base = gm
  modified_base 15: mod_base = gm
  modified_base 16: mod_base = gm
  modified_base 17: mod_base = OTHER; note = 2'-O-methyladenosine
  modified_base 18: mod_base = OTHER; note = 2'-O-methyladenosine
  modified_base 19: mod_base = OTHER; note = 2'-O-methyladenosine with a 3'-phosphorothioate linkage
  modified_base 20: mod_base = OTHER; note = 2'-O-methylguanosine with a 3'-phosphorothioate linkage
  modified_base 21: mod_base = OTHER; note = 2'-O-methyladenosine
ttagagctttctcgggaaaga

SEQ ID NO: 1467 - RNA, 23 nt, synthetic construct
  source 1..23: mol_type = other RNA
  modified_base 1: mod_base = OTHER; note = 2'-O-methyluridine with a 3'-phosphorothioate linkage and a 5'-phosphate substitution
  modified_base 2: mod_base = OTHER; note = 2'-fluorocytidine with a 3'-phosphorothioate linkage
  modified_base 3: mod_base = um
  modified_base 4: mod_base = um
  modified_base 5: mod_base = OTHER; note = 2'-fluorouridine
  modified_base 6: mod_base = cm
  modified_base 7: mod_base = OTHER; note = 2'-fluorocytidine
  modified_base 8: mod_base = cm
  modified_base 9: mod_base = gm
  modified_base 10: mod_base = OTHER; note = 2'-O-methyladenosine
  modified_base 11: mod_base = gm
  modified_base 12: mod_base = OTHER; note = 2'-O-methyladenosine
  modified_base 13: mod_base = OTHER; note = 2'-O-methyladenosine
  modified_base 14: mod_base = OTHER; note = 2'-fluoroadenosine
  modified_base 15: mod_base = gm
  modified_base 16: mod_base = OTHER; note = 2'-fluorocytidine
  modified_base 17: mod_base = um
  modified_base 18: mod_base = cm
  modified_base 19: mod_base = um
  modified_base 20: mod_base = OTHER; note = 2'-O-methyladenosine
  modified_base 21: mod_base = OTHER; note = 2'-O-methyladenosine with a 3'-phosphorothioate linkage
  modified_base 22: mod_base = OTHER; note = 2'-O-methyluridine with a 3'-phosphorothioate linkage
  modified_base 23: mod_base = OTHER; note = 2'-O-methyladenosine
tctttcccgagaaagctctaata

SEQ ID NO: 1468 - RNA, 21 nt, synthetic construct
  source 1..21: mol_type = other RNA
  modified_base 1: mod_base = OTHER; note = 2'-O-methyluridine with a 3'-phosphorothioate linkage
  modified_base 2: mod_base = OTHER; note = 2'-O-methyladenosine with a 3'-phosphorothioate linkage
  modified_base 3: mod_base = gm
  modified_base 4: mod_base = OTHER; note = 2'-O-methyladenosine
  modified_base 5: mod_base = gm
  modified_base 6: mod_base = cm
  modified_base 7: mod_base = um
  modified_base 8: mod_base = um
  modified_base 9: mod_base = OTHER; note = 2'-fluorouridine
  modified_base 10: mod_base = OTHER; note = 2'-fluorocytidine
  modified_base 11: mod_base = OTHER; note = 2'-fluorouridine
  modified_base 12: mod_base = cm
  modified_base 13: mod_base = gm
  modified_base 14: mod_base = gm
  modified_base 15: mod_base = gm
  modified_base 16: mod_base = OTHER; note = 2'-O-methyladenosine
  modified_base 17: mod_base = OTHER; note = 2'-O-methyladenosine
  modified_base 18: mod_base = OTHER; note = 2'-O-methyladenosine
  modified_base 19: mod_base = OTHER; note = 2'-O-methylguanosine with a 3'-phosphorothioate linkage
  modified_base 20: mod_base = OTHER; note = 2'-O-methylcytidine with a 3'-phosphorothioate linkage
  modified_base 21: mod_base = OTHER; note = 2'-O-methyladenosine
tagagctttctcgggaaagca

SEQ ID NO: 1469 - RNA, 23 nt, synthetic construct
  source 1..23: mol_type = other RNA
  modified_base 1: mod_base = OTHER; note = 2'-O-methyluridine with a 3'-phosphorothioate linkage and a 5'-phosphate substitution
  modified_base 2: mod_base = OTHER; note = 2'-fluoroguanosine with a 3'-phosphorothioate linkage
  modified_base 3: mod_base = cm
  modified_base 4: mod_base = um
  modified_base 5: mod_base = OTHER; note = 2'-fluorouridine
  modified_base 6: mod_base = um
  modified_base 7: mod_base = OTHER; note = 2'-fluorocytidine
  modified_base 8: mod_base = cm
  modified_base 9: mod_base = cm
  modified_base 10: mod_base = gm
  modified_base 11: mod_base = OTHER; note = 2'-O-methyladenosine
  modified_base 12: mod_base = gm
  modified_base 13: mod_base = OTHER; note = 2'-O-methyladenosine
  modified_base 14: mod_base = OTHER; note = 2'-fluoroadenosine
  modified_base 15: mod_base = OTHER; note = 2'-O-methyladenosine
  modified_base 16: mod_base = OTHER; note = 2'-fluoroguanosine
  modified_base 17: mod_base = cm
  modified_base 18: mod_base = um
  modified_base 19: mod_base = cm
  modified_base 20: mod_base = um
  modified_base 21: mod_base = OTHER; note = 2'-O-methyladenosine with a 3'-phosphorothioate linkage
  modified_base 22: mod_base = OTHER; note = 2'-O-methyladenosine with a 3'-phosphorothioate linkage
  modified_base 23: mod_base = um
tgctttcccgagaaagctctaat

SEQ ID NO: 1470 - RNA, 21 nt, synthetic construct
  source 1..21: mol_type = other RNA
  modified_base 1: mod_base = OTHER; note = 2'-O-methylguanosine with a 3'-phosphorothioate linkage
  modified_base 2: mod_base = OTHER; note = 2'-O-methyladenosine with a 3'-phosphorothioate linkage
  modified_base 3: mod_base = gm
  modified_base 4: mod_base = cm
  modified_base 5: mod_base = um
  modified_base 6: mod_base = um
  modified_base 7: mod_base = um
  modified_base 8: mod_base = cm
  modified_base 9: mod_base = OTHER; note = 2'-fluorouridine
  modified_base 10: mod_base = OTHER; note = 2'-fluorocytidine
  modified_base 11: mod_base = OTHER; note = 2'-fluoroguanosine
  modified_base 12: mod_base = gm
  modified_base 13: mod_base = gm
  modified_base 14: mod_base = OTHER; note = 2'-O-methyladenosine
  modified_base 15: mod_base = OTHER; note = 2'-O-methyladenosine
  modified_base 16: mod_base = OTHER; note = 2'-O-methyladenosine
  modified_base 17: mod_base = gm
  modified_base 18: mod_base = cm
  modified_base 19: mod_base = OTHER; note = 2'-O-methylcytidine with a 3'-phosphorothioate linkage
  modified_base 20: mod_base = OTHER; note = 2'-O-methylguanosine with a 3'-phosphorothioate linkage
  modified_base 21: mod_base = OTHER; note = 2'-O-methyladenosine
gagctttctcgggaaagccga

SEQ ID NO: 1471 - RNA, 23 nt, synthetic construct
  source 1..23: mol_type = other RNA
  modified_base 1: mod_base = OTHER; note = 2'-O-methyluridine with a 3'-phosphorothioate linkage and a 5'-phosphate substitution
  modified_base 2: mod_base = OTHER; note = 2'-fluorocytidine with a 3'-phosphorothioate linkage
  modified_base 3: mod_base = gm
  modified_base 4: mod_base = gm
  modified_base 5: mod_base = OTHER; note = 2'-fluorocytidine
  modified_base 6: mod_base = um
  modified_base 7: mod_base = OTHER; note = 2'-fluorouridine
  modified_base 8: mod_base = um
  modified_base 9: mod_base = cm
  modified_base 10: mod_base = cm
  modified_base 11: mod_base = cm
  modified_base 12: mod_base = gm
  modified_base 13: mod_base = OTHER; note = 2'-O-methyladenosine
  modified_base 14: mod_base = OTHER; note = 2'-fluoroguanosine
  modified_base 15: mod_base = OTHER; note = 2'-O-methyladenosine
  modified_base 16: mod_base = OTHER; note = 2'-fluoroadenosine
  modified_base 17: mod_base = OTHER; note = 2'-O-methyladenosine
  modified_base 18: mod_base = gm
  modified_base 19: mod_base = cm
  modified_base 20: mod_base = um
  modified_base 21: mod_base = OTHER; note = 2'-O-methylcytidine with a 3'-phosphorothioate linkage
  modified_base 22: mod_base = OTHER; note = 2'-O-methyluridine with a 3'-phosphorothioate linkage
  modified_base 23: mod_base = OTHER; note = 2'-O-methyladenosine
tcggctttcccgagaaagctcta

SEQ ID NO: 1472 - RNA, 21 nt, synthetic construct
  source 1..21: mol_type = other RNA
  modified_base 1: mod_base = OTHER; note = 2'-O-methylguanosine with a 3'-phosphorothioate linkage
  modified_base 2: mod_base = OTHER; note = 2'-O-methylguanosine with a 3'-phosphorothioate linkage
  modified_base 3: mod_base = gm
  modified_base 4: mod_base = OTHER; note = 2'-O-methyladenosine
  modified_base 5: mod_base = OTHER; note = 2'-O-methyladenosine
  modified_base 6: mod_base = OTHER; note = 2'-O-methyladenosine
  modified_base 7: mod_base = gm
  modified_base 8: mod_base = cm
  modified_base 9: mod_base = OTHER; note = 2'-fluorocytidine
  modified_base 10: mod_base = OTHER; note = 2'-fluoroguanosine
  modified_base 11: mod_base = OTHER; note = 2'-fluorocytidine
  modified_base 12: mod_base = gm
  modified_base 13: mod_base = OTHER; note = 2'-O-methyladenosine
  modified_base 14: mod_base = gm
  modified_base 15: mod_base = gm
  modified_base 16: mod_base = gm
  modified_base 17: mod_base = um
  modified_base 18: mod_base = cm
  modified_base 19: mod_base = OTHER; note = 2'-O-methylguanosine with a 3'-phosphorothioate linkage
  modified_base 20: mod_base = OTHER; note = 2'-O-methyluridine with a 3'-phosphorothioate linkage
  modified_base 21: mod_base = OTHER; note = 2'-O-methyladenosine
gggaaagccgcgagggtcgta

SEQ ID NO: 1473 - RNA, 23 nt, synthetic construct
  source 1..23: mol_type = other RNA
  modified_base 1: mod_base = OTHER; note = 2'-O-methyluridine with a 3'-phosphorothioate linkage and a 5'-phosphate substitution
  modified_base 2: mod_base = OTHER; note = 2'-fluoroadenosine with a 3'-phosphorothioate linkage
  modified_base 3: mod_base = cm
  modified_base 4: mod_base = gm
  modified_base 5: mod_base = OTHER; note = 2'-fluoroadenosine
  modified_base 6: mod_base = cm
  modified_base 7: mod_base = OTHER; note = 2'-fluorocytidine
  modified_base 8: mod_base = cm
  modified_base 9: mod_base = um
  modified_base 10: mod_base = cm
  modified_base 11: mod_base = gm
  modified_base 12: mod_base = cm
  modified_base 13: mod_base = gm
  modified_base 14: mod_base = OTHER; note = 2'-fluoroguanosine
  modified_base 15: mod_base = cm
  modified_base 16: mod_base = OTHER; note = 2'-fluorouridine
  modified_base 17: mod_base = um
  modified_base 18: mod_base = um
  modified_base 19: mod_base = cm
  modified_base 20: mod_base = cm
  modified_base 21: mod_base = OTHER; note = 2'-O-methylcytidine with a 3'-phosphorothioate linkage
  modified_base 22: mod_base = OTHER; note = 2'-O-methylguanosine with a 3'-phosphorothioate linkage
  modified_base 23: mod_base = OTHER; note = 2'-O-methyladenosine
tacgaccctcgcggctttcccga

SEQ ID NO: 1474 - RNA, 21 nt, synthetic construct
  source 1..21: mol_type = other RNA
  modified_base 1: mod_base = OTHER; note = 2'-O-methylguanosine with a 3'-phosphorothioate linkage
  modified_base 2: mod_base = OTHER; note = 2'-O-methylguanosine with a 3'-phosphorothioate linkage
  modified_base 3: mod_base = OTHER; note = 2'-O-methyladenosine
  modified_base 4: mod_base = OTHER; note = 2'-O-methyladenosine
  modified_base 5: mod_base = OTHER; note = 2'-O-methyladenosine
  modified_base 6: mod_base = gm
  modified_base 7: mod_base = cm
  modified_base 8: mod_base = cm
  modified_base 9: mod_base = OTHER; note = 2'-fluoroguanosine
  modified_base 10: mod_base = OTHER; note = 2'-fluorocytidine
  modified_base 11: mod_base = OTHER; note = 2'-fluoroguanosine
  modified_base 12: mod_base = OTHER; note = 2'-O-methyladenosine
  modified_base 13: mod_base = gm
  modified_base 14: mod_base = gm
  modified_base 15: mod_base = gm
  modified_base 16: mod_base = um
  modified_base 17: mod_base = cm
  modified_base 18: mod_base = gm
  modified_base 19: mod_base = OTHER; note = 2'-O-methyluridine with a 3'-phosphorothioate linkage
  modified_base 20: mod_base = OTHER; note = 2'-O-methylcytidine with a 3'-phosphorothioate linkage
  modified_base 21: mod_base = OTHER; note = 2'-O-methyladenosine
ggaaagccgcgagggtcgtca

SEQ ID NO: 1475 - RNA, 23 nt, synthetic construct
  source 1..23: mol_type = other RNA
  modified_base 1: mod_base = OTHER; note = 2'-O-methyluridine with a 3'-phosphorothioate linkage and a 5'-phosphate substitution
  modified_base 2: mod_base = OTHER; note = 2'-fluoroguanosine with a 3'-phosphorothioate linkage
  modified_base 3: mod_base = OTHER; note = 2'-O-methyladenosine
  modified_base 4: mod_base = cm
  modified_base 5: mod_base = OTHER; note = 2'-fluoroguanosine
  modified_base 6: mod_base = OTHER; note = 2'-O-methyladenosine
  modified_base 7: mod_base = OTHER; note = 2'-fluorocytidine
  modified_base 8: mod_base = cm
  modified_base 9: mod_base = cm
  modified_base 10: mod_base = um
  modified_base 11: mod_base = cm
  modified_base 12: mod_base = gm
  modified_base 13: mod_base = cm
  modified_base 14: mod_base = OTHER; note = 2'-fluoroguanosine
  modified_base 15: mod_base = gm
  modified_base 16: mod_base = OTHER; note = 2'-fluorocytidine
  modified_base 17: mod_base = um
  modified_base 18: mod_base = um
  modified_base 19: mod_base = um
  modified_base 20: mod_base = cm
  modified_base 21: mod_base = OTHER; note = 2'-O-methylcytidine with a 3'-phosphorothioate linkage
  modified_base 22: mod_base = OTHER; note = 2'-O-methylcytidine with a 3'-phosphorothioate linkage
  modified_base 23: mod_base = gm
tgacgaccctcgcggctttcccg

SEQ ID NO: 1476 - RNA, 21 nt, synthetic construct
  source 1..21: mol_type = other RNA
  modified_base 1: mod_base = OTHER; note = 2'-O-methylguanosine with a 3'-phosphorothioate linkage
  modified_base 2: mod_base = OTHER; note = 2'-O-methyladenosine with a 3'-phosphorothioate linkage
  modified_base 3: mod_base = OTHER; note = 2'-O-methyladenosine
  modified_base 4: mod_base = OTHER; note = 2'-O-methyladenosine
  modified_base 5: mod_base = gm
  modified_base 6: mod_base = cm
  modified_base 7: mod_base = cm
  modified_base 8: mod_base = gm
  modified_base 9: mod_base = OTHER; note = 2'-fluorocytidine
  modified_base 10: mod_base = OTHER; note = 2'-fluoroguanosine
  modified_base 11: mod_base = OTHER; note = 2'-fluoroadenosine
  modified_base 12: mod_base = gm
  modified_base 13: mod_base = gm
  modified_base 14: mod_base = gm
  modified_base 15: mod_base = um
  modified_base 16: mod_base = cm
  modified_base 17: mod_base = gm
  modified_base 18: mod_base = um
  modified_base 19: mod_base = OTHER; note = 2'-O-methylcytidine with a 3'-phosphorothioate linkage
  modified_base 20: mod_base = OTHER; note = 2'-O-methylcytidine with a 3'-phosphorothioate linkage
  modified_base 21: mod_base = OTHER; note = 2'-O-methyladenosine
gaaagccgcgagggtcgtcca

SEQ ID NO: 1477 - RNA, 23 nt, synthetic construct
  source 1..23: mol_type = other RNA
  modified_base 1: mod_base = OTHER; note = 2'-O-methyluridine with a 3'-phosphorothioate linkage and a 5'-phosphate substitution
  modified_base 2: mod_base = OTHER; note = 2'-fluoroguanosine with a 3'-phosphorothioate linkage
  modified_base 3: mod_base = gm
  modified_base 4: mod_base = OTHER; note = 2'-O-methyladenosine
  modified_base 5: mod_base = OTHER; note = 2'-fluorocytidine
  modified_base 6: mod_base = gm
  modified_base 7: mod_base = OTHER; note = 2'-fluoroadenosine
  modified_base 8: mod_base = cm
  modified_base 9: mod_base = cm
  modified_base 10: mod_base = cm
  modified_base 11: mod_base = um
  modified_base 12: mod_base = cm
  modified_base 13: mod_base = gm
  modified_base 14: mod_base = OTHER; note = 2'-fluorocytidine
  modified_base 15: mod_base = gm
  modified_base 16: mod_base = OTHER; note = 2'-fluoroguanosine
  modified_base 17: mod_base = cm
  modified_base 18: mod_base = um
  modified_base 19: mod_base = um
  modified_base 20: mod_base = um
  modified_base 21: mod_base = OTHER; note = 2'-O-methylcytidine with a 3'-phosphorothioate linkage
  modified_base 22: mod_base = OTHER; note = 2'-O-methylcytidine with a 3'-phosphorothioate linkage
  modified_base 23: mod_base = cm
tggacgaccctcgcggctttccc

SEQ ID NO: 1478 - RNA, 21 nt, synthetic construct
  source 1..21: mol_type = other RNA
  modified_base 1: mod_base = OTHER; note = 2'-O-methyladenosine with a 3'-phosphorothioate linkage
  modified_base 2: mod_base = OTHER; note = 2'-O-methyladenosine with a 3'-phosphorothioate linkage
  modified_base 3: mod_base = OTHER; note = 2'-O-methyladenosine
  modified_base 4: mod_base = gm
  modified_base 5: mod_base = cm
  modified_base 6: mod_base = cm
  modified_base 7: mod_base = gm
  modified_base 8: mod_base = cm
  modified_base 9: mod_base = OTHER; note = 2'-fluoroguanosine
  modified_base 10: mod_base = OTHER; note = 2'-fluoroadenosine
  modified_base 11: mod_base = OTHER; note = 2'-fluoroguanosine
  modified_base 12: mod_base = gm
  modified_base 13: mod_base = gm
  modified_base 14: mod_base = um
  modified_base 15: mod_base = cm
  modified_base 16: mod_base = gm
  modified_base 17: mod_base = um
  modified_base 18: mod_base = cm
  modified_base 19: mod_base = OTHER; note = 2'-O-methylcytidine with a 3'-phosphorothioate linkage
  modified_base 20: mod_base = OTHER; note = 2'-O-methyladenosine with a 3'-phosphorothioate linkage
  modified_base 21: mod_base = OTHER; note = 2'-O-methyladenosine
aaagccgcgagggtcgtccaa

SEQ ID NO: 1479 - RNA, 23 nt, synthetic construct
  source 1..23: mol_type = other RNA
  modified_base 1: mod_base = OTHER; note = 2'-O-methyluridine with a 3'-phosphorothioate linkage and a 5'-phosphate substitution
  modified_base 2: mod_base = OTHER; note = 2'-fluorouridine with a 3'-phosphorothioate linkage
  modified_base 3: mod_base = gm
  modified_base 4: mod_base = gm
  modified_base 5: mod_base = OTHER; note = 2'-fluoroadenosine
  modified_base 6: mod_base = cm
  modified_base 7: mod_base = OTHER; note = 2'-fluoroguanosine
  modified_base 8: mod_base = OTHER; note = 2'-O-methyladenosine
  modified_base 9: mod_base = cm
  modified_base 10: mod_base = cm
  modified_base 11: mod_base = cm
  modified_base 12: mod_base = um
  modified_base 13: mod_base = cm
  modified_base 14: mod_base = OTHER; note = 2'-fluoroguanosine
  modified_base 15: mod_base = cm
  modified_base 16: mod_base = OTHER; note = 2'-fluoroguanosine
  modified_base 17: mod_base = gm
  modified_base 18: mod_base = cm
  modified_base 19: mod_base = um
  modified_base 20: mod_base = um
  modified_base 21: mod_base = OTHER; note = 2'-O-methyluridine with a 3'-phosphorothioate linkage
  modified_base 22: mod_base = OTHER; note = 2'-O-methylcytidine with a 3'-phosphorothioate linkage
  modified_base 23: mod_base = cm
ttggacgaccctcgcggctttcc

SEQ ID NO: 1480 - RNA, 21 nt, synthetic construct
  source 1..21: mol_type = other RNA
  modified_base 1: mod_base = OTHER; note = 2'-O-methyladenosine with a 3'-phosphorothioate linkage
  modified_base 2: mod_base = OTHER; note = 2'-O-methyladenosine with a 3'-phosphorothioate linkage
  modified_base 3: mod_base = gm
  modified_base 4: mod_base = cm
  modified_base 5: mod_base = cm
  modified_base 6: mod_base = gm
  modified_base 7: mod_base = cm
  modified_base 8: mod_base = gm
  modified_base 9: mod_base = OTHER; note = 2'-fluoroadenosine
  modified_base 10: mod_base = OTHER; note = 2'-fluoroguanosine
  modified_base 11: mod_base = OTHER; note = 2'-fluoroguanosine
  modified_base 12: mod_base = gm
  modified_base 13: mod_base = um
  modified_base 14: mod_base = cm
  modified_base 15: mod_base = gm
  modified_base 16: mod_base = um
  modified_base 17: mod_base = cm
  modified_base 18: mod_base = cm
  modified_base 19: mod_base = OTHER; note = 2'-O-methyladenosine with a 3'-phosphorothioate linkage
  modified_base 20: mod_base = OTHER; note = 2'-O-methyladenosine with a 3'-phosphorothioate linkage
  modified_base 21: mod_base = OTHER; note = 2'-O-methyladenosine
aagccgcgagggtcgtccaaa

SEQ ID NO: 1481 - RNA, 23 nt, synthetic construct
  source 1..23: mol_type = other RNA
  modified_base 1: mod_base = OTHER; note = 2'-O-methyluridine with a 3'-phosphorothioate linkage and a 5'-phosphate substitution
  modified_base 2: mod_base = OTHER; note = 2'-fluorouridine with a 3'-phosphorothioate linkage
  modified_base 3: mod_base = um
  modified_base 4: mod_base = gm
  modified_base 5: mod_base = OTHER; note = 2'-fluoroguanosine
  modified_base 6: mod_base = OTHER; note = 2'-O-methyladenosine
  modified_base 7: mod_base = OTHER; note = 2'-fluorocytidine
  modified_base 8: mod_base = gm
  modified_base 9: mod_base = OTHER; note = 2'-O-methyladenosine
  modified_base 10: mod_base = cm
  modified_base 11: mod_base = cm
  modified_base 12: mod_base = cm
  modified_base 13: mod_base = um
  modified_base 14: mod_base = OTHER; note = 2'-fluorocytidine
  modified_base 15: mod_base = gm
  modified_base 16: mod_base = OTHER; note = 2'-fluorocytidine
  modified_base 17: mod_base = gm
  modified_base 18: mod_base = gm
  modified_base 19: mod_base = cm
  modified_base 20: mod_base = um
  modified_base 21: mod_base = OTHER; note = 2'-O-methyluridine with a 3'-phosphorothioate linkage
  modified_base 22: mod_base = OTHER; note = 2'-O-methyluridine with a 3'-phosphorothioate linkage
  modified_base 23: mod_base = cm
tttggacgaccctcgcggctttc

SEQ ID NO: 1482 - RNA, 21 nt, synthetic construct
  source 1..21: mol_type = other RNA
  modified_base 1: mod_base = OTHER; note = 2'-O-methyladenosine with a 3'-phosphorothioate linkage
  modified_base 2: mod_base = OTHER; note = 2'-O-methylguanosine with a 3'-phosphorothioate linkage
  modified_base 3: mod_base = cm
  modified_base 4: mod_base = cm
  modified_base 5: mod_base = gm
  modified_base 6: mod_base = cm
  modified_base 7: mod_base = gm
  modified_base 8: mod_base = OTHER; note = 2'-O-methyladenosine
  modified_base 9: mod_base = OTHER; note = 2'-fluoroguanosine
  modified_base 10: mod_base = OTHER; note = 2'-fluoroguanosine
  modified_base 11: mod_base = OTHER; note = 2'-fluoroguanosine
  modified_base 12: mod_base = um
  modified_base 13: mod_base = cm
  modified_base 14: mod_base = gm
  modified_base 15: mod_base = um
  modified_base 16: mod_base = cm
  modified_base 17: mod_base = cm
  modified_base 18: mod_base = OTHER; note = 2'-O-methyladenosine
  modified_base 19: mod_base = OTHER; note = 2'-O-methyladenosine with a 3'-phosphorothioate linkage
  modified_base 20: mod_base = OTHER; note = 2'-O-methyluridine with a 3'-phosphorothioate linkage
  modified_base 21: mod_base = OTHER; note = 2'-O-methyladenosine
agccgcgagggtcgtccaata

SEQ ID NO: 1483 - RNA, 23 nt, synthetic construct
  source 1..23: mol_type = other RNA
  modified_base 1: mod_base = OTHER; note = 2'-O-methyluridine with a 3'-phosphorothioate linkage and a 5'-phosphate substitution
  modified_base 2: mod_base = OTHER; note = 2'-fluoroadenosine with a 3'-phosphorothioate linkage
  modified_base 3: mod_base = um
  modified_base 4: mod_base = um
  modified_base 5: mod_base = OTHER; note = 2'-fluoroguanosine
  modified_base 6: mod_base = gm
  modified_base 7: mod_base = OTHER; note = 2'-fluoroadenosine
  modified_base 8: mod_base = cm
  modified_base 9: mod_base = gm
  modified_base 10: mod_base = OTHER; note = 2'-O-methyladenosine
  modified_base 11: mod_base = cm
  modified_base 12: mod_base = cm
  modified_base 13: mod_base = cm
  modified_base 14: mod_base = OTHER; note = 2'-fluorouridine
  modified_base 15: mod_base = cm
  modified_base 16: mod_base = OTHER; note = 2'-fluoroguanosine
  modified_base 17: mod_base = cm
  modified_base 18: mod_base = gm
  modified_base 19: mod_base = gm
  modified_base 20: mod_base = cm
  modified_base 21: mod_base = OTHER; note = 2'-O-methyluridine with a 3'-phosphorothioate linkage
  modified_base 22: mod_base = OTHER; note = 2'-O-methyluridine with a 3'-phosphorothioate linkage
  modified_base 23: mod_base = um
tattggacgaccctcgcggcttt

SEQ ID NO: 1484 - RNA, 21 nt, synthetic construct
  source 1..21: mol_type = other RNA
  modified_base 1: mod_base = OTHER; note = 2'-O-methylguanosine with a 3'-phosphorothioate linkage
  modified_base 2: mod_base = OTHER; note = 2'-O-methylcytidine with a 3'-phosphorothioate linkage
  modified_base 3: mod_base = cm
  modified_base 4: mod_base = gm
  modified_base 5: mod_base = cm
  modified_base 6: mod_base = gm
  modified_base 7: mod_base = OTHER; note = 2'-O-methyladenosine
  modified_base 8: mod_base = gm
  modified_base 9: mod_base = OTHER; note = 2'-fluoroguanosine
  modified_base 10: mod_base = OTHER; note = 2'-fluoroguanosine
  modified_base 11: mod_base = OTHER; note = 2'-fluorouridine
  modified_base 12: mod_base = cm
  modified_base 13: mod_base = gm
  modified_base 14: mod_base = um
  modified_base 15: mod_base = cm
  modified_base 16: mod_base = cm
  modified_base 17: mod_base = OTHER; note = 2'-O-methyladenosine
  modified_base 18: mod_base = OTHER; note = 2'-O-methyladenosine
  modified_base 19: mod_base = OTHER; note = 2'-O-methyluridine with a 3'-phosphorothioate linkage
  modified_base 20: mod_base = OTHER; note = 2'-O-methyluridine with a 3'-phosphorothioate linkage
  modified_base 21: mod_base = OTHER; note = 2'-O-methyladenosine
gccgcgagggtcgtccaatta

SEQ ID NO: 1485 - RNA, 23 nt, synthetic construct
  source 1..23: mol_type = other RNA
  modified_base 1: mod_base = OTHER; note = 2'-O-methyluridine with a 3'-phosphorothioate linkage and a 5'-phosphate substitution
  modified_base 2: mod_base = OTHER; note = 2'-fluoroadenosine with a 3'-phosphorothioate linkage
  modified_base 3: mod_base = OTHER; note = 2'-O-methyladenosine
  modified_base 4: mod_base = um
  modified_base 5: mod_base = OTHER; note = 2'-fluorouridine
  modified_base 6: mod_base = gm
  modified_base 7: mod_base = OTHER; note = 2'-fluoroguanosine
  modified_base 8: mod_base = OTHER; note = 2'-O-methyladenosine
  modified_base 9: mod_base = cm
  modified_base 10: mod_base = gm
  modified_base 11: mod_base = OTHER; note = 2'-O-methyladenosine
  modified_base 12: mod_base = cm
  modified_base 13: mod_base = cm
  modified_base 14: mod_base = OTHER; note = 2'-fluorocytidine
  modified_base 15: mod_base = um
  modified_base 16: mod_base = OTHER; note = 2'-fluorocytidine
  modified_base 17: mod_base = gm
  modified_base 18: mod_base = cm
  modified_base 19: mod_base = gm
  modified_base 20: mod_base = gm
  modified_base 21: mod_base = OTHER; note = 2'-O-methylcytidine with a 3'-phosphorothioate linkage
  modified_base 22: mod_base = OTHER; note = 2'-O-methyluridine with a 3'-phosphorothioate linkage
  modified_base 23: mod_base = um
taattggacgaccctcgcggctt

SEQ ID NO: 1486 - RNA, 21 nt, synthetic construct
  source 1..21: mol_type = other RNA
  modified_base 1: mod_base = OTHER; note = 2'-O-methylcytidine with a 3'-phosphorothioate linkage
  modified_base 2: mod_base = OTHER; note = 2'-O-methylcytidine with a 3'-phosphorothioate linkage
  modified_base 3: mod_base = gm
  modified_base 4: mod_base = cm
  modified_base 5: mod_base = gm
  modified_base 6: mod_base = OTHER; note = 2'-O-methyladenosine
  modified_base 7: mod_base = gm
  modified_base 8: mod_base = gm
  modified_base 9: mod_base = OTHER; note = 2'-fluoroguanosine
  modified_base 10: mod_base = OTHER; note = 2'-fluorouridine
  modified_base 11: mod_base = OTHER; note = 2'-fluorocytidine
  modified_base 12: mod_base = gm
  modified_base 13: mod_base = um
  modified_base 14: mod_base = cm
  modified_base 15: mod_base = cm
  modified_base 16: mod_base = OTHER; note = 2'-O-methyladenosine
  modified_base 17: mod_base = OTHER; note = 2'-O-methyladenosine
  modified_base 18: mod_base = um
  modified_base 19: mod_base = OTHER; note = 2'-O-methyluridine with a 3'-phosphorothioate linkage
  modified_base 20: mod_base = OTHER; note = 2'-O-methyluridine with a 3'-phosphorothioate linkage
  modified_base 21: mod_base = OTHER; note = 2'-O-methyladenosine
ccgcgagggtcgtccaattta

SEQ ID NO: 1487 - RNA, 23 nt, synthetic construct
  source 1..23: mol_type = other RNA
  modified_base 1: mod_base = OTHER; note = 2'-O-methyluridine with a 3'-phosphorothioate linkage and a 5'-phosphate substitution
  modified_base 2: mod_base = OTHER; note = 2'-fluoroadenosine with a 3'-phosphorothioate linkage
  modified_base 3: mod_base = OTHER; note = 2'-O-methyladenosine
  modified_base 4: mod_base = OTHER; note = 2'-O-methyladenosine
  modified_base 5: mod_base = OTHER; note = 2'-fluorouridine
  modified_base 6: mod_base = um
  modified_base 7: mod_base = OTHER; note = 2'-fluoroguanosine
  modified_base 8: mod_base = gm
  modified_base 9: mod_base = OTHER; note = 2'-O-methyladenosine
  modified_base 10: mod_base = cm
  modified_base 11: mod_base = gm
  modified_base 12: mod_base = OTHER; note = 2'-O-methyladenosine
  modified_base 13: mod_base = cm
  modified_base 14: mod_base = OTHER; note = 2'-fluorocytidine
  modified_base 15: mod_base = cm
  modified_base 16: mod_base = OTHER; note = 2'-fluorouridine
  modified_base 17: mod_base = cm
  modified_base 18: mod_base = gm
  modified_base 19: mod_base = cm
  modified_base 20: mod_base = gm
  modified_base 21: mod_base = OTHER; note = 2'-O-methylguanosine with a 3'-phosphorothioate linkage
  modified_base 22: mod_base = OTHER; note = 2'-O-methylcytidine with a 3'-phosphorothioate linkage
  modified_base 23: mod_base = um
taaattggacgaccctcgcggct

SEQ ID NO: 1488 - RNA, 21 nt, synthetic construct
  source 1..21: mol_type = other RNA
  modified_base 1: mod_base = OTHER; note = 2'-O-methylcytidine with a 3'-phosphorothioate linkage
  modified_base 2: mod_base = OTHER; note = 2'-O-methylguanosine with a 3'-phosphorothioate linkage
  modified_base 3: mod_base = cm
  modified_base 4: mod_base = gm
  modified_base 5: mod_base = OTHER; note = 2'-O-methyladenosine
  modified_base 6: mod_base = gm
  modified_base 7: mod_base = gm
  modified_base 8: mod_base = gm
  modified_base 9: mod_base = OTHER; note = 2'-fluorouridine
  modified_base 10: mod_base = OTHER; note = 2'-fluorocytidine
  modified_base 11: mod_base = OTHER; note = 2'-fluoroguanosine
  modified_base 12: mod_base = um
  modified_base 13: mod_base = cm
  modified_base 14: mod_base = cm
  modified_base 15: mod_base = OTHER; note = 2'-O-methyladenosine
  modified_base 16: mod_base = OTHER; note = 2'-O-methyladenosine
  modified_base 17: mod_base = um
  modified_base 18: mod_base = um
  modified_base 19: mod_base = OTHER; note = 2'-O-methyluridine with a 3'-phosphorothioate linkage
  modified_base 20: mod_base = OTHER; note = 2'-O-methylguanosine with a 3'-phosphorothioate linkage
  modified_base 21: mod_base = OTHER; note = 2'-O-methyladenosine
cgcgagggtcgtccaatttga

SEQ ID NO: 1489 - RNA, 23 nt, synthetic construct
  source 1..23: mol_type = other RNA
  modified_base 1: mod_base = OTHER; note = 2'-O-methyluridine with a 3'-phosphorothioate linkage and a 5'-phosphate substitution
  modified_base 2: mod_base = OTHER; note = 2'-fluorocytidine with a 3'-phosphorothioate linkage
  modified_base 3: mod_base = OTHER; note = 2'-O-methyladenosine
  modified_base 4: mod_base = OTHER; note = 2'-O-methyladenosine
  modified_base 5: mod_base = OTHER; note = 2'-fluoroadenosine
  modified_base 6: mod_base = um
  modified_base 7: mod_base = OTHER; note = 2'-fluorouridine
  modified_base 8: mod_base = gm
  modified_base 9: mod_base = gm
  modified_base 10: mod_base = OTHER; note = 2'-O-methyladenosine
  modified_base 11: mod_base = cm
  modified_base 12: mod_base = gm
  modified_base 13: mod_base = OTHER; note = 2'-O-methyladenosine
  modified_base 14: mod_base = OTHER; note = 2'-fluorocytidine
  modified_base 15: mod_base = cm
  modified_base 16: mod_base = OTHER; note = 2'-fluorocytidine
  modified_base 17: mod_base = um
  modified_base 18: mod_base = cm
  modified_base 19: mod_base = gm
  modified_base 20: mod_base = cm
  modified_base 21: mod_base = OTHER; note = 2'-O-methylguanosine with a 3'-phosphorothioate linkage
  modified_base 22: mod_base = OTHER; note = 2'-O-methylguanosine with a 3'-phosphorothioate linkage
  modified_base 23: mod_base = cm
tcaaattggacgaccctcgcggc

SEQ ID NO: 1490 - RNA, 21 nt, synthetic construct
  source 1..21: mol_type = other RNA
  modified_base 1: mod_base = OTHER; note = 2'-O-methylcytidine with a 3'-phosphorothioate linkage
  modified_base 2: mod_base = OTHER; note = 2'-O-methylcytidine with a 3'-phosphorothioate linkage
  modified_base 3: mod_base = cm
  modified_base 4: mod_base = gm
  modified_base 5: mod_base = OTHER; note = 2'-O-methyladenosine
  modified_base 6: mod_base = gm
  modified_base 7: mod_base = um
  modified_base 8: mod_base = um
  modified_base 9: mod_base = OTHER; note = 2'-fluorouridine
  modified_base 10: mod_base = OTHER; note = 2'-fluorouridine
  modified_base 11: mod_base = OTHER; note = 2'-fluoroadenosine
  modified_base 12: mod_base = gm
  modified_base 13: mod_base = OTHER; note = 2'-O-methyladenosine
  modified_base 14: mod_base = OTHER; note = 2'-O-methyladenosine
  modified_base 15: mod_base = gm
  modified_base 16: mod_base = OTHER; note = 2'-O-methyladenosine
  modified_base 17: mod_base = OTHER; note = 2'-O-methyladenosine
  modified_base 18: mod_base = gm
  modified_base 19: mod_base = OTHER; note = 2'-O-methyladenosine with a 3'-phosphorothioate linkage
  modified_base 20: mod_base = OTHER; note = 2'-O-methyladenosine with a 3'-phosphorothioate linkage
  modified_base 21: mod_base = OTHER; note = 2'-O-methyladenosine
cccgagttttagaagaagaaa

SEQ ID NO: 1491 - RNA, 23 nt, synthetic construct
  source 1..23: mol_type = other RNA
  modified_base 1: mod_base = OTHER; note = 2'-O-methyluridine with a 3'-phosphorothioate linkage and a 5'-phosphate substitution
  modified_base 2: mod_base = OTHER; note = 2'-fluorouridine with a 3'-phosphorothioate linkage
  modified_base 3: mod_base = um
  modified_base 4: mod_base = cm
  modified_base 5: mod_base = OTHER; note = 2'-fluorouridine
  modified_base 6: mod_base = um
  modified_base 7: mod_base = OTHER; note = 2'-fluorocytidine
  modified_base 8: mod_base = um
  modified_base 9: mod_base = um
  modified_base 10: mod_base = cm
  modified_base 11: mod_base = um
  modified_base 12: mod_base = OTHER; note = 2'-O-methyladenosine
  modified_base 13: mod_base = OTHER; note = 2'-O-methyladenosine
  modified_base 14: mod_base = OTHER; note = 2'-fluoroadenosine
  modified_base 15: mod_base = OTHER; note = 2'-O-methyladenosine
  modified_base 16: mod_base = OTHER; note = 2'-fluorocytidine
  modified_base 17: mod_base = um
  modified_base 18: mod_base = cm
  modified_base 19: mod_base = gm
  modified_base 20: mod_base = gm
  modified_base 21: mod_base = OTHER; note = 2'-O-methylguanosine with a 3'-phosphorothioate linkage
  modified_base 22: mod_base = OTHER; note = 2'-O-methylcytidine with a 3'-phosphorothioate linkage
  modified_base 23: mod_base = OTHER; note = 2'-O-methyladenosine
tttcttcttctaaaactcgggca

SEQ ID NO: 1492 - RNA, 21 nt, synthetic construct
  source 1..21: mol_type = other RNA
  modified_base 1: mod_base = OTHER; note = 2'-O-methylcytidine with a 3'-phosphorothioate linkage
  modified_base 2: mod_base = OTHER; note = 2'-O-methyluridine with a 3'-phosphorothioate linkage
  modified_base 3: mod_base = cm
  modified_base 4: mod_base = OTHER; note = 2'-O-methyladenosine
  modified_base 5: mod_base = gm
  modified_base 6: mod_base = OTHER; note = 2'-O-methyladenosine
  modified_base 7: mod_base = gm
  modified_base 8: mod_base = gm
  modified_base 9: mod_base = OTHER; note = 2'-fluoroguanosine
  modified_base 10: mod_base = OTHER; note = 2'-fluorouridine
  modified_base 11: mod_base = OTHER; note = 2'-fluorocytidine
  modified_base 12: mod_base = OTHER; note = 2'-O-methyladenosine
  modified_base 13: mod_base = OTHER; note = 2'-O-methyladenosine
  modified_base 14: mod_base = gm
  modified_base 15: mod_base = OTHER; note = 2'-O-methyladenosine
  modified_base 16: mod_base = um
  modified_base 17: mod_base = gm
  modified_base 18: mod_base = OTHER; note = 2'-O-methyladenosine
  modified_base 19: mod_base = OTHER; note = 2'-O-methyluridine with a 3'-phosphorothioate linkage
  modified_base 20: mod_base = OTHER; note = 2'-O-methyluridine with a 3'-phosphorothioate linkage
  modified_base 21: mod_base = OTHER; note = 2'-O-methyladenosine
ctcagagggtcaagatgatta

SEQ ID NO: 1493 - RNA, 23 nt, synthetic construct
  source 1..23: mol_type = other RNA
  modified_base 1: mod_base = OTHER; note = 2'-O-methyluridine with a 3'-phosphorothioate linkage and a 5'-phosphate substitution
  modified_base 2: mod_base = OTHER; note = 2'-fluoroadenosine with a 3'-phosphorothioate linkage
  modified_base 3: mod_base = OTHER; note = 2'-O-methyladenosine
  modified_base 4: mod_base = um
  modified_base 5: mod_base = OTHER; note = 2'-fluorocytidine
  modified_base 6: mod_base = OTHER; note = 2'-O-methyladenosine
  modified_base 7: mod_base = OTHER; note = 2'-fluorouridine
  modified_base 8: mod_base = cm
  modified_base 9: mod_base = um
  modified_base 10: mod_base = um
  modified_base 11: mod_base = gm
  modified_base 12: mod_base = OTHER; note = 2'-O-methyladenosine
  modified_base 13: mod_base = cm
  modified_base 14: mod_base = OTHER; note = 2'-fluorocytidine
  modified_base 15: mod_base = cm
  modified_base 16: mod_base = OTHER; note = 2'-fluorouridine
  modified_base 17: mod_base = cm
  modified_base 18: mod_base = um
  modified_base 19: mod_base = gm
  modified_base 20: mod_base = OTHER; note = 2'-O-methyladenosine
  modified_base 21: mod_base = OTHER; note = 2'-O-methylguanosine with a 3'-phosphorothioate linkage
  modified_base 22: mod_base = OTHER; note = 2'-O-methyluridine with a 3'-phosphorothioate linkage
  modified_base 23: mod_base = um
taatcatcttgaccctctgagtt

SEQ ID NO: 1494 - RNA, 21 nt, synthetic construct
  source 1..21: mol_type = other RNA
  modified_base 1: mod_base = OTHER; note = 2'-O-methylguanosine with a 3'-phosphorothioate linkage
  modified_base 2: mod_base = OTHER; note = 2'-O-methylguanosine with a 3'-phosphorothioate linkage
  modified_base 3: mod_base = um
  modified_base 4: mod_base = cm
  modified_base 5: mod_base = OTHER; note = 2'-O-methyladenosine
  modified_base 6: mod_base = OTHER; note = 2'-O-methyladenosine
  modified_base 7: mod_base = gm
  modified_base 8: mod_base = OTHER; note = 2'-O-methyladenosine
  modified_base 9: mod_base = OTHER; note = 2'-fluorouridine
  modified_base 10: mod_base = OTHER; note = 2'-fluoroguanosine
  modified_base 11: mod_base = OTHER; note = 2'-fluoroadenosine
  modified_base 12: mod_base = um
  modified_base 13: mod_base = um
  modified_base 14: mod_base = OTHER; note = 2'-O-methyladenosine
  modified_base 15: mod_base = um
  modified_base 16: mod_base = gm
  modified_base 17: mod_base = um
  modified_base 18: mod_base = cm
  modified_base 19: mod_base = OTHER; note = 2'-O-methyluridine with a 3'-phosphorothioate linkage
  modified_base 20: mod_base = OTHER; note = 2'-O-methylcytidine with a 3'-phosphorothioate linkage
  modified_base 21: mod_base = OTHER; note = 2'-O-methyladenosine
ggtcaagatgattatgtctca

SEQ ID NO: 1495 - RNA, 23 nt, synthetic construct
  source 1..23: mol_type = other RNA
  modified_base 1: mod_base = OTHER; note = 2'-O-methyluridine with a 3'-phosphorothioate linkage and a 5'-phosphate substitution
  modified_base 2: mod_base = OTHER; note = 2'-fluoroguanosine with a 3'-phosphorothioate linkage
  modified_base 3: mod_base = OTHER; note = 2'-O-methyladenosine
  modified_base 4: mod_base = gm
  modified_base 5: mod_base = OTHER; note = 2'-fluoroadenosine
  modified_base 6: mod_base = cm
  modified_base 7: mod_base = OTHER; note = 2'-fluoroadenosine
  modified_base 8: mod_base = um
  modified_base 9: mod_base = OTHER; note = 2'-O-methyladenosine
  modified_base 10: mod_base = OTHER; note = 2'-O-methyladenosine
  modified_base 11: mod_base = um
  modified_base 12: mod_base = cm
  modified_base 13: mod_base = OTHER; note = 2'-O-methyladenosine
  modified_base 14: mod_base = OTHER; note = 2'-fluorouridine
  modified_base 15: mod_base = cm
  modified_base 16: mod_base = OTHER; note = 2'-fluorouridine
  modified_base 17: mod_base = um
  modified_base 18: mod_base = gm
  modified_base 19: mod_base = OTHER; note = 2'-O-methyladenosine
  modified_base 20: mod_base = cm
  modified_base 21: mod_base = OTHER; note = 2'-O-methylcytidine with a 3'-phosphorothioate linkage
  modified_base 22: mod_base = OTHER; note = 2'-O-methylcytidine with a 3'-phosphorothioate linkage
  modified_base 23: mod_base = um
tgagacataatcatcttgaccct

SEQ ID NO: 1496 - RNA, 21 nt, synthetic construct
  source 1..21: mol_type = other RNA
  modified_base 1: mod_base = OTHER; note = 2'-O-methylguanosine with a 3'-phosphorothioate linkage
  modified_base 2: mod_base = OTHER; note = 2'-O-methyluridine with a 3'-phosphorothioate linkage
  modified_base 3: mod_base = cm
  modified_base 4: mod_base = OTHER; note = 2'-O-methyladenosine
  modified_base 5: mod_base = OTHER; note = 2'-O-methyladenosine
  modified_base 6: mod_base = gm
  modified_base 7: mod_base = OTHER; note = 2'-O-methyladenosine
  modified_base 8: mod_base = um
  modified_base 9: mod_base = OTHER; note = 2'-fluoroguanosine
  modified_base 10: mod_base = OTHER; note = 2'-fluoroadenosine
  modified_base 11: mod_base = OTHER; note = 2'-fluorouridine
  modified_base 12: mod_base = um
  modified_base 13: mod_base = OTHER; note = 2'-O-methyladenosine
  modified_base 14: mod_base = um
  modified_base 15: mod_base = gm
  modified_base 16: mod_base = um
  modified_base 17: mod_base = cm
  modified_base 18: mod_base = um
  modified_base 19: mod_base = OTHER; note = 2'-O-methylcytidine with a 3'-phosphorothioate linkage
  modified_base 20: mod_base = OTHER; note = 2'-O-methyluridine with a 3'-phosphorothioate linkage
  modified_base 21: mod_base = OTHER; note = 2'-O-methyladenosine
gtcaagatgattatgtctcta

SEQ ID NO: 1497 - RNA, 23 nt, synthetic construct
  source 1..23: mol_type = other RNA
  modified_base 1: mod_base = OTHER; note = 2'-O-methyluridine with a 3'-phosphorothioate linkage and a 5'-phosphate substitution
  modified_base 2: mod_base = OTHER; note = 2'-fluoroadenosine with a 3'-phosphorothioate linkage
  modified_base 3: mod_base = gm
  modified_base 4: mod_base = OTHER; note = 2'-O-methyladenosine
  modified_base 5: mod_base = OTHER; note = 2'-fluoroguanosine
  modified_base 6: mod_base = OTHER; note = 2'-O-methyladenosine
  modified_base 7: mod_base = OTHER; note = 2'-fluorocytidine
  modified_base 8: mod_base = OTHER; note = 2'-O-methyladenosine
  modified_base 9: mod_base = um
  modified_base 10: mod_base = OTHER; note = 2'-O-methyladenosine
  modified_base 11: mod_base = OTHER; note = 2'-O-methyladenosine
  modified_base 12: mod_base = um
  modified_base 13: mod_base = cm
  modified_base 14: mod_base = OTHER; note = 2'-fluoroadenosine
  modified_base 15: mod_base = um
  modified_base 16: mod_base = OTHER; note = 2'-fluorocytidine
  modified_base 17: mod_base = um
  modified_base 18: mod_base = um
  modified_base 19: mod_base = gm
  modified_base 20: mod_base = OTHER; note = 2'-O-methyladenosine
  modified_base 21: mod_base = OTHER; note = 2'-O-methylcytidine with a 3'-phosphorothioate linkage
  modified_base 22: mod_base = OTHER; note = 2'-O-methylcytidine with a 3'-phosphorothioate linkage
  modified_base 23: mod_base = cm
tagagacataatcatcttgaccc

SEQ ID NO: 1498 - RNA, 21 nt, synthetic construct
  source 1..21: mol_type = other RNA
  modified_base 1: mod_base = OTHER; note = 2'-O-methylcytidine with a 3'-phosphorothioate linkage
  modified_base 2: mod_base = OTHER; note = 2'-O-methyladenosine with a 3'-phosphorothioate linkage
  modified_base 3: mod_base = OTHER; note = 2'-O-methyladenosine
  modified_base 4: mod_base = gm
  modified_base 5: mod_base = OTHER; note = 2'-O-methyladenosine
  modified_base 6: mod_base = um
  modified_base 7: mod_base = gm
  modified_base 8: mod_base = OTHER; note = 2'-O-methyladenosine
  modified_base 9: mod_base = OTHER; note = 2'-fluorouridine
  modified_base 10: mod_base = OTHER; note = 2'-fluorouridine
  modified_base 11: mod_base = OTHER; note = 2'-fluoroadenosine
  modified_base 12: mod_base = um
  modified_base 13: mod_base = gm
  modified_base 14: mod_base = um
  modified_base 15: mod_base = cm
  modified_base 16: mod_base = um
  modified_base 17: mod_base = cm
  modified_base 18: mod_base = um
  modified_base 19: mod_base = OTHER; note = 2'-O-methyladenosine with a 3'-phosphorothioate linkage
  modified_base 20: mod_base = OTHER; note = 2'-O-methylguanosine with a 3'-phosphorothioate linkage
  modified_base 21: mod_base = OTHER; note = 2'-O-methyladenosine
caagatgattatgtctctaga

SEQ ID NO: 1499 - RNA, 23 nt, synthetic construct
  source 1..23: mol_type = other RNA
  modified_base 1: mod_base = OTHER; note = 2'-O-methyluridine with a 3'-phosphorothioate linkage and a 5'-phosphate substitution
  modified_base 2: mod_base = OTHER; note = 2'-fluorocytidine with a 3'-phosphorothioate linkage
  modified_base 3: mod_base = um
  modified_base 4: mod_base = OTHER; note = 2'-O-methyladenosine
  modified_base 5: mod_base = OTHER; note = 2'-fluoroguanosine
  modified_base 6: mod_base = OTHER; note = 2'-O-methyladenosine
  modified_base 7: mod_base = OTHER; note = 2'-fluoroguanosine
  modified_base 8: mod_base = OTHER; note = 2'-O-methyladenosine
  modified_base 9: mod_base = cm
  modified_base 10: mod_base = OTHER; note = 2'-O-methyladenosine
  modified_base 11: mod_base = um
  modified_base 12: mod_base = OTHER; note = 2'-O-methyladenosine
  modified_base 13: mod_base = OTHER; note = 2'-O-methyladenosine
  modified_base 14: mod_base = OTHER; note = 2'-fluorouridine
  modified_base 15: mod_base = cm
  modified_base 16: mod_base = OTHER; note = 2'-fluoroadenosine
  modified_base 17: mod_base = um
  modified_base 18: mod_base = cm
  modified_base 19: mod_base = um
  modified_base 20: mod_base = um
  modified_base 21: mod_base = OTHER; note = 2'-O-methylguanosine with a 3'-phosphorothioate linkage
  modified_base 22: mod_base = OTHER; note = 2'-O-methyladenosine with a 3'-phosphorothioate linkage
  modified_base 23: mod_base = cm
tctagagacataatcatcttgac

SEQ ID NO: 1500 - RNA, 21 nt, synthetic construct
  source 1..21: mol_type = other RNA
  modified_base 1: mod_base = OTHER; note = 2'-O-methyladenosine with a 3'-phosphorothioate linkage
  modified_base 2: mod_base = OTHER; note = 2'-O-methyladenosine with a 3'-phosphorothioate linkage
  modified_base 3: mod_base = gm
  modified_base 4: mod_base = OTHER; note = 2'-O-methyladenosine
  modified_base 5: mod_base = um
  modified_base 6: mod_base = gm
  modified_base 7: mod_base = OTHER; note = 2'-O-methyladenosine
  modified_base 8: mod_base = um
  modified_base 9: mod_base = OTHER; note = 2'-fluorouridine
  modified_base 10: mod_base = OTHER; note = 2'-fluoroadenosine
  modified_base 11: mod_base = OTHER; note = 2'-fluorouridine
  modified_base 12: mod_base = gm
  modified_base 13: mod_base = um
  modified_base 14: mod_base = cm
  modified_base 15: mod_base = um
  modified_base 16: mod_base = cm
  modified_base 17: mod_base = um
  modified_base 18: mod_base = OTHER; note = 2'-O-methyladenosine
  modified_base 19: mod_base = OTHER; note = 2'-O-methylguanosine with a 3'-phosphorothioate linkage
  modified_base 20: mod_base = OTHER; note = 2'-O-methylguanosine with a 3'-phosphorothioate linkage
  modified_base 21: mod_base = OTHER; note = 2'-O-methyladenosine
aagatgattatgtctctagga

SEQ ID NO: 1501 - RNA, 23 nt, synthetic construct
  source 1..23: mol_type = other RNA
  modified_base 1: mod_base = OTHER; note = 2'-O-methyluridine with a 3'-phosphorothioate linkage and a 5'-phosphate substitution
  modified_base 2: mod_base = OTHER; note = 2'-fluorocytidine with a 3'-phosphorothioate linkage
  modified_base 3: mod_base = cm
  modified_base 4: mod_base = um
  modified_base 5: mod_base = OTHER; note = 2'-fluoroadenosine
  modified_base 6: mod_base = gm
  modified_base 7: mod_base = OTHER; note = 2'-fluoroadenosine
  modified_base 8: mod_base = gm
  modified_base 9: mod_base = OTHER; note = 2'-O-methyladenosine
  modified_base 10: mod_base = cm
  modified_base 11: mod_base = OTHER; note = 2'-O-methyladenosine
  modified_base 12: mod_base = um
  modified_base 13: mod_base = OTHER; note = 2'-O-methyladenosine
  modified_base 14: mod_base = OTHER; note = 2'-fluoroadenosine
  modified_base 15: mod_base = um
  modified_base 16: mod_base = OTHER; note = 2'-fluorocytidine
  modified_base 17: mod_base = OTHER; note = 2'-O-methyladenosine
  modified_base 18: mod_base = um
  modified_base 19: mod_base = cm
  modified_base 20: mod_base = um
  modified_base 21: mod_base = OTHER; note = 2'-O-methyluridine with a 3'-phosphorothioate linkage
  modified_base 22: mod_base = OTHER; note = 2'-O-methylguanosine with a 3'-phosphorothioate linkage
  modified_base 23: mod_base = OTHER; note = 2'-O-methyladenosine
tcctagagacataatcatcttga

SEQ ID NO: 1502 - RNA, 21 nt, synthetic construct
  source 1..21: mol_type = other RNA
  modified_base 1: mod_base = OTHER; note = 2'-O-methyladenosine with a 3'-phosphorothioate linkage
  modified_base 2: mod_base = OTHER; note = 2'-O-methylguanosine with a 3'-phosphorothioate linkage
  modified_base 3: mod_base = OTHER; note = 2'-O-methyladenosine
  modified_base 4: mod_base = um
  modified_base 5: mod_base = gm
  modified_base 6: mod_base = OTHER; note = 2'-O-methyladenosine
  modified_base 7: mod_base = um
  modified_base 8: mod_base = um
  modified_base 9: mod_base = OTHER; note = 2'-fluoroadenosine
  modified_base 10: mod_base = OTHER; note = 2'-fluorouridine
  modified_base 11: mod_base = OTHER; note = 2'-fluoroguanosine
  modified_base 12: mod_base = um
  modified_base 13: mod_base = cm
  modified_base 14: mod_base = um
  modified_base 15: mod_base = cm
  modified_base 16: mod_base = um
  modified_base 17: mod_base = OTHER; note = 2'-O-methyladenosine
  modified_base 18: mod_base = gm
  modified_base 19: mod_base = OTHER; note = 2'-O-methylguanosine with a 3'-phosphorothioate linkage
  modified_base 20: mod_base = OTHER; note = 2'-O-methylcytidine with a 3'-phosphorothioate linkage
  modified_base 21: mod_base = OTHER; note = 2'-O-methyladenosine
agatgattatgtctctaggca

SEQ ID NO: 1503 - RNA, 23 nt, synthetic construct
  source 1..23: mol_type = other RNA
  modified_base 1: mod_base = OTHER; note = 2'-O-methyluridine with a 3'-phosphorothioate linkage and a 5'-phosphate substitution
  modified_base 2: mod_base = OTHER; note = 2'-fluoroguanosine with a 3'-phosphorothioate linkage
  modified_base 3: mod_base = cm
  modified_base 4: mod_base = cm
  modified_base 5: mod_base = OTHER; note = 2'-fluorouridine
  modified_base 6: mod_base = OTHER; note = 2'-O-methyladenosine
  modified_base 7: mod_base = OTHER; note = 2'-fluoroguanosine
  modified_base 8: mod_base = OTHER; note = 2'-O-methyladenosine
  modified_base 9: mod_base = gm
  modified_base 10: mod_base = OTHER; note = 2'-O-methyladenosine
  modified_base 11: mod_base = cm
  modified_base 12: mod_base = OTHER; note = 2'-O-methyladenosine
  modified_base 13: mod_base = um
  modified_base 14: mod_base = OTHER; note = 2'-fluoroadenosine
  modified_base 15: mod_base = OTHER; note = 2'-O-methyladenosine
  modified_base 16: mod_base = OTHER; note = 2'-fluorouridine
  modified_base 17: mod_base = cm
  modified_base 18: mod_base = OTHER; note = 2'-O-methyladenosine
  modified_base 19: mod_base = um
  modified_base 20: mod_base = cm
  modified_base 21: mod_base = OTHER; note = 2'-O-methyluridine with a 3'-phosphorothioate linkage
  modified_base 22: mod_base = OTHER; note = 2'-O-methyluridine with a 3'-phosphorothioate linkage
  modified_base 23: mod_base = gm
tgcctagagacataatcatcttg

SEQ ID NO: 1504 - RNA, 21 nt, synthetic construct
  source 1..21: mol_type = other RNA
  modified_base 1: mod_base = OTHER; note = 2'-O-methylguanosine with a 3'-phosphorothioate linkage
  modified_base 2: mod_base = OTHER; note = 2'-O-methyladenosine with a 3'-phosphorothioate linkage
  modified_base 3: mod_base = um
  modified_base 4: mod_base = gm
  modified_base 5: mod_base = OTHER; note = 2'-O-methyladenosine
  modified_base 6: mod_base = um
  modified_base 7: mod_base = um
  modified_base 8: mod_base = OTHER; note = 2'-O-methyladenosine
  modified_base 9: mod_base = OTHER; note = 2'-fluorouridine
  modified_base 10: mod_base = OTHER; note = 2'-fluoroguanosine
  modified_base 11: mod_base = OTHER; note = 2'-fluorouridine
  modified_base 12: mod_base = cm
  modified_base 13: mod_base = um
  modified_base 14: mod_base = cm
  modified_base 15: mod_base = um
  modified_base 16: mod_base = OTHER; note = 2'-O-methyladenosine
  modified_base 17: mod_base = gm
  modified_base 18: mod_base = gm
  modified_base 19: mod_base = OTHER; note = 2'-O-methylcytidine with a 3'-phosphorothioate linkage
  modified_base 20: mod_base = OTHER; note = 2'-O-methyluridine with a 3'-phosphorothioate linkage
  modified_base 21: mod_base = OTHER; note = 2'-O-methyladenosine
gatgattatgtctctaggcta

SEQ ID NO: 1505 - RNA, 23 nt, synthetic construct
  source 1..23: mol_type = other RNA
  modified_base 1: mod_base = OTHER; note = 2'-O-methyluridine with a 3'-phosphorothioate linkage and a 5'-phosphate substitution
  modified_base 2: mod_base = OTHER; note = 2'-fluoroadenosine with a 3'-phosphorothioate linkage
  modified_base 3: mod_base = gm
  modified_base 4: mod_base = cm
  modified_base 5: mod_base = OTHER; note = 2'-fluorocytidine
  modified_base 6: mod_base = um
  modified_base 7: mod_base = OTHER; note = 2'-fluoroadenosine
  modified_base 8: mod_base = gm
  modified_base 9: mod_base = OTHER; note = 2'-O-methyladenosine
  modified_base 10: mod_base = gm
  modified_base 11: mod_base = OTHER; note = 2'-O-methyladenosine
  modified_base 12: mod_base = cm
  modified_base 13: mod_base = OTHER; note = 2'-O-methyladenosine
  modified_base 14: mod_base = OTHER; note = 2'-fluorouridine
  modified_base 15: mod_base = OTHER; note = 2'-O-methyladenosine
  modified_base 16: mod_base = OTHER; note = 2'-fluoroadenosine
  modified_base 17: mod_base = um
  modified_base 18: mod_base = cm
  modified_base 19: mod_base = OTHER; note = 2'-O-methyladenosine
  modified_base 20: mod_base = um
  modified_base 21: mod_base = OTHER; note = 2'-O-methylcytidine with a 3'-phosphorothioate linkage
  modified_base 22: mod_base = OTHER; note = 2'-O-methyluridine with a 3'-phosphorothioate linkage
  modified_base 23: mod_base = um
tagcctagagacataatcatctt

SEQ ID NO: 1506 - RNA, 21 nt, synthetic construct
  source 1..21: mol_type = other RNA
  modified_base 1: mod_base = OTHER; note = 2'-O-methyladenosine with a 3'-phosphorothioate linkage
  modified_base 2: mod_base = OTHER; note = 2'-O-methyluridine with a 3'-phosphorothioate linkage
  modified_base 3: mod_base = gm
  modified_base 4: mod_base = OTHER; note = 2'-O-methyladenosine
  modified_base 5: mod_base = um
  modified_base 6: mod_base = um
  modified_base 7: mod_base = OTHER; note = 2'-O-methyladenosine
  modified_base 8: mod_base = um
  modified_base 9: mod_base = OTHER; note = 2'-fluoroguanosine
  modified_base 10: mod_base = OTHER; note = 2'-fluorouridine
  modified_base 11: mod_base = OTHER; note = 2'-fluorocytidine
  modified_base 12: mod_base = um
  modified_base 13: mod_base = cm
  modified_base 14: mod_base = um
  modified_base 15: mod_base = OTHER; note = 2'-O-methyladenosine
  modified_base 16: mod_base = gm
  modified_base 17: mod_base = gm
  modified_base 18: mod_base = cm
  modified_base 19: mod_base = OTHER; note = 2'-O-methyluridine with a 3'-phosphorothioate linkage
  modified_base 20: mod_base = OTHER; note = 2'-O-methyluridine with a 3'-phosphorothioate linkage
  modified_base 21: mod_base = OTHER; note = 2'-O-methyladenosine
atgattatgtctctaggctta

SEQ ID NO: 1507 - RNA, 23 nt, synthetic construct
  source 1..23: mol_type = other RNA
  modified_base 1: mod_base = OTHER; note = 2'-O-methyluridine with a 3'-phosphorothioate linkage and a 5'-phosphate substitution
  modified_base 2: mod_base = OTHER; note = 2'-fluoroadenosine with a 3'-phosphorothioate linkage
  modified_base 3: mod_base = OTHER; note = 2'-O-methyladenosine
  modified_base 4: mod_base = gm
  modified_base 5: mod_base = OTHER; note = 2'-fluorocytidine
  modified_base 6: mod_base = cm
  modified_base 7: mod_base = OTHER; note = 2'-fluorouridine
  modified_base 8: mod_base = OTHER; note = 2'-O-methyladenosine
  modified_base 9: mod_base = gm
  modified_base 10: mod_base = OTHER; note = 2'-O-methyladenosine
  modified_base 11: mod_base = gm
  modified_base 12: mod_base = OTHER; note = 2'-O-methyladenosine
  modified_base 13: mod_base = cm
  modified_base 14: mod_base = OTHER; note = 2'-fluoroadenosine
  modified_base 15: mod_base = um
  modified_base 16: mod_base = OTHER; note = 2'-fluoroadenosine
  modified_base 17: mod_base = OTHER; note = 2'-O-methyladenosine
  modified_base 18: mod_base = um
  modified_base 19: mod_base = cm
  modified_base 20: mod_base = OTHER; note = 2'-O-methyladenosine
  modified_base 21: mod_base = OTHER; note = 2'-O-methyluridine with a 3'-phosphorothioate linkage
  modified_base 22: mod_base = OTHER; note = 2'-O-methylcytidine with a 3'-phosphorothioate linkage
  modified_base 23: mod_base = um
taagcctagagacataatcatct

SEQ ID NO: 1508 - RNA, 21 nt, synthetic construct
  source 1..21: mol_type = other RNA
  modified_base 1: mod_base = OTHER; note = 2'-O-methyluridine with a 3'-phosphorothioate linkage
  modified_base 2: mod_base = OTHER; note = 2'-O-methylguanosine with a 3'-phosphorothioate linkage
  modified_base 3: mod_base = OTHER; note = 2'-O-methyladenosine
  modified_base 4: mod_base = um
  modified_base 5: mod_base = um
  modified_base 6: mod_base = OTHER; note = 2'-O-methyladenosine
  modified_base 7: mod_base = um
  modified_base 8: mod_base = gm
  modified_base 9: mod_base = OTHER; note = 2'-fluorouridine
  modified_base 10: mod_base = OTHER; note = 2'-fluorocytidine
  modified_base 11: mod_base = OTHER; note = 2'-fluorouridine
  modified_base 12: mod_base = cm
  modified_base 13: mod_base = um
  modified_base 14: mod_base = OTHER; note = 2'-O-methyladenosine
  modified_base 15: mod_base = gm
  modified_base 16: mod_base = gm
  modified_base 17: mod_base = cm
  modified_base 18: mod_base = um
  modified_base 19: mod_base = OTHER; note = 2'-O-methyluridine with a 3'-phosphorothioate linkage
  modified_base 20: mod_base = OTHER; note = 2'-O-methylguanosine with a 3'-phosphorothioate linkage
  modified_base 21: mod_base = OTHER; note = 2'-O-methyladenosine
tgattatgtctctaggcttga

SEQ ID NO: 1509 - RNA, 23 nt, synthetic construct
  source 1..23: mol_type = other RNA
  modified_base 1: mod_base = OTHER; note = 2'-O-methyluridine with a 3'-phosphorothioate linkage and a 5'-phosphate substitution
  modified_base 2: mod_base = OTHER; note = 2'-fluorocytidine with a 3'-phosphorothioate linkage
  modified_base 3: mod_base = OTHER; note = 2'-O-methyladenosine
  modified_base 4: mod_base = OTHER; note = 2'-O-methyladenosine
  modified_base 5: mod_base = OTHER; note = 2'-fluoroguanosine
  modified_base 6: mod_base = cm
  modified_base 7: mod_base = OTHER; note = 2'-fluorocytidine
  modified_base 8: mod_base = um
  modified_base 9: mod_base = OTHER; note = 2'-O-methyladenosine
  modified_base 10: mod_base = gm
  modified_base 11: mod_base = OTHER; note = 2'-O-methyladenosine
  modified_base 12: mod_base = gm
  modified_base 13: mod_base = OTHER; note = 2'-O-methyladenosine
  modified_base 14: mod_base = OTHER; note = 2'-fluorocytidine
  modified_base 15: mod_base = OTHER; note = 2'-O-methyladenosine
  modified_base 16: mod_base = OTHER; note = 2'-fluorouridine
  modified_base 17: mod_base = OTHER; note = 2'-O-methyladenosine
  modified_base 18: mod_base = OTHER; note = 2'-O-methyladenosine
  modified_base 19: mod_base = um
  modified_base 20: mod_base = cm
  modified_base 21: mod_base = OTHER; note = 2'-O-methyladenosine with a 3'-phosphorothioate linkage
  modified_base 22: mod_base = OTHER; note = 2'-O-methyluridine with a 3'-phosphorothioate linkage
  modified_base 23: mod_base = cm
tcaagcctagagacataatcatc

SEQ ID NO: 1510 - RNA, 21 nt, synthetic construct
  source 1..21: mol_type = other RNA
  modified_base 1: mod_base = OTHER; note = 2'-O-methyladenosine with a 3'-phosphorothioate linkage
  modified_base 2: mod_base = OTHER; note = 2'-O-methyluridine with a 3'-phosphorothioate linkage
  modified_base 3: mod_base = gm
  modified_base 4: mod_base = cm
  modified_base 5: mod_base = um
  modified_base 6: mod_base = cm
  modified_base 7: mod_base = OTHER; note = 2'-O-methyladenosine
  modified_base 8: mod_base = cm
  modified_base 9: mod_base = OTHER; note = 2'-fluoroadenosine
  modified_base 10: mod_base = OTHER; note = 2'-fluoroguanosine
  modified_base 11: mod_base = OTHER; note = 2'-fluorouridine
  modified_base 12: mod_base = cm
  modified_base 13: mod_base = gm
  modified_base 14: mod_base = cm
  modified_base 15: mod_base = um
  modified_base 16: mod_base = gm
  modified_base 17: mod_base = gm
  modified_base 18: mod_base = OTHER; note = 2'-O-methyladenosine
  modified_base 19: mod_base = OTHER; note = 2'-O-methyluridine with a 3'-phosphorothioate linkage
  modified_base 20: mod_base = OTHER; note = 2'-O-methyladenosine with a 3'-phosphorothioate linkage
  modified_base 21: mod_base = OTHER; note = 2'-O-methyladenosine
atgctcacagtcgctggataa

SEQ ID NO: 1511 - RNA, 23 nt, synthetic construct
  source 1..23: mol_type = other RNA
  modified_base 1: mod_base = OTHER; note = 2'-O-methyluridine with a 3'-phosphorothioate linkage and a 5'-phosphate substitution
  modified_base 2: mod_base = OTHER; note = 2'-fluorouridine with a 3'-phosphorothioate linkage
  modified_base 3: mod_base = OTHER; note = 2'-O-methyladenosine
  modified_base 4: mod_base = um
  modified_base 5: mod_base = OTHER; note = 2'-fluorocytidine
  modified_base 6: mod_base = cm
  modified_base 7: mod_base = OTHER; note = 2'-fluoroadenosine
  modified_base 8: mod_base = gm
  modified_base 9: mod_base = cm
  modified_base 10: mod_base = gm
  modified_base 11: mod_base = OTHER; note = 2'-O-methyladenosine
  modified_base 12: mod_base = cm
  modified_base 13: mod_base = um
  modified_base 14: mod_base = OTHER; note = 2'-fluoroguanosine
  modified_base 15: mod_base = um
  modified_base 16: mod_base = OTHER; note = 2'-fluoroguanosine
  modified_base 17: mod_base = OTHER; note = 2'-O-methyladenosine
  modified_base 18: mod_base = gm
  modified_base 19: mod_base = cm
  modified_base 20: mod_base = OTHER; note = 2'-O-methyladenosine
  modified_base 21: mod_base = OTHER; note = 2'-O-methyluridine with a 3'-phosphorothioate linkage
  modified_base 22: mod_base = OTHER; note = 2'-O-methylguanosine with a 3'-phosphorothioate linkage
  modified_base 23: mod_base = OTHER; note = 2'-O-methyladenosine
ttatccagcgactgtgagcatga

SEQ ID NO: 1512 - RNA, 21 nt, synthetic construct
  source 1..21: mol_type = other RNA
  modified_base 1: mod_base = OTHER; note = 2'-O-methyluridine with a 3'-phosphorothioate linkage
  modified_base 2: mod_base = OTHER; note = 2'-O-methylguanosine with a 3'-phosphorothioate linkage
  modified_base 3: mod_base = cm
  modified_base 4: mod_base = um
  modified_base 5: mod_base = cm
  modified_base 6: mod_base = OTHER; note = 2'-O-methyladenosine
  modified_base 7: mod_base = cm
  modified_base 8: mod_base = OTHER; note = 2'-O-methyladenosine
  modified_base 9: mod_base = OTHER; note = 2'-fluoroguanosine
  modified_base 10: mod_base = OTHER; note = 2'-fluorouridine
  modified_base 11: mod_base = OTHER; note = 2'-fluorocytidine
  modified_base 12: mod_base = gm
  modified_base 13: mod_base = cm
  modified_base 14: mod_base = um
  modified_base 15: mod_base = gm
  modified_base 16: mod_base = gm
  modified_base 17: mod_base = OTHER; note = 2'-O-methyladenosine
  modified_base 18: mod_base = um
  modified_base 19: mod_base = OTHER; note = 2'-O-methyladenosine with a 3'-phosphorothioate linkage
  modified_base 20: mod_base = OTHER; note = 2'-O-methylguanosine with a 3'-phosphorothioate linkage
  modified_base 21: mod_base = OTHER; note = 2'-O-methyladenosine
tgctcacagtcgctggataga

SEQ ID NO: 1513 - RNA, 23 nt, synthetic construct
  source 1..23: mol_type = other RNA
  modified_base 1: mod_base = OTHER; note = 2'-O-methyluridine with a 3'-phosphorothioate linkage and a 5'-phosphate substitution
  modified_base 2: mod_base = OTHER; note = 2'-fluorocytidine with a 3'-phosphorothioate linkage
  modified_base 3: mod_base = um
  modified_base 4: mod_base = OTHER; note = 2'-O-methyladenosine
  modified_base 5: mod_base = OTHER; note = 2'-fluorouridine
  modified_base 6: mod_base = cm
  modified_base 7: mod_base = OTHER; note = 2'-fluorocytidine
  modified_base 8: mod_base = OTHER; note = 2'-O-methyladenosine
  modified_base 9: mod_base = gm
  modified_base 10: mod_base = cm
  modified_base 11: mod_base = gm
  modified_base 12: mod_base = OTHER; note = 2'-O-methyladenosine
  modified_base 13: mod_base = cm
  modified_base 14: mod_base = OTHER; note = 2'-fluorouridine
  modified_base 15: mod_base = gm
  modified_base 16: mod_base = OTHER; note = 2'-fluorouridine
  modified_base 17: mod_base = gm
  modified_base 18: mod_base = OTHER; note = 2'-O-methyladenosine
  modified_base 19: mod_base = gm
  modified_base 20: mod_base = cm
  modified_base 21: mod_base = OTHER; note = 2'-O-methyladenosine with a 3'-phosphorothioate linkage
  modified_base 22: mod_base = OTHER; note = 2'-O-methyluridine with a 3'-phosphorothioate linkage
  modified_base 23: mod_base = gm
tctatccagcgactgtgagcatg

SEQ ID NO: 1514 - RNA, 21 nt, synthetic construct
  source 1..21: mol_type = other RNA
  modified_base 1: mod_base = OTHER; note = 2'-O-methylguanosine with a 3'-phosphorothioate linkage
  modified_base 2: mod_base = OTHER; note = 2'-O-methylcytidine with a 3'-phosphorothioate linkage
  modified_base 3: mod_base = um
  modified_base 4: mod_base = cm
  modified_base 5: mod_base = OTHER; note = 2'-O-methyladenosine
  modified_base 6: mod_base = cm
  modified_base 7: mod_base = OTHER; note = 2'-O-methyladenosine
  modified_base 8: mod_base = gm
  modified_base 9: mod_base = OTHER; note = 2'-fluorouridine
  modified_base 10: mod_base = OTHER; note = 2'-fluorocytidine
  modified_base 11: mod_base = OTHER; note = 2'-fluoroguanosine
  modified_base 12: mod_base = cm
  modified_base 13: mod_base = um
  modified_base 14: mod_base = gm
  modified_base 15: mod_base = gm
  modified_base 16: mod_base = OTHER; note = 2'-O-methyladenosine
  modified_base 17: mod_base = um
  modified_base 18: mod_base = OTHER; note = 2'-O-methyladenosine
  modified_base 19: mod_base = OTHER; note = 2'-O-methylguanosine with a 3'-phosphorothioate linkage
  modified_base 20: mod_base = OTHER; note = 2'-O-methylcytidine with a 3'-phosphorothioate linkage
  modified_base 21: mod_base = OTHER; note = 2'-O-methyladenosine
gctcacagtcgctggatagca

SEQ ID NO: 1515 - RNA, 23 nt, synthetic construct
  source 1..23: mol_type = other RNA
  modified_base 1: mod_base = OTHER; note = 2'-O-methyluridine with a 3'-phosphorothioate linkage and a 5'-phosphate substitution
  modified_base 2: mod_base = OTHER; note = 2'-fluoroguanosine with a 3'-phosphorothioate linkage
  modified_base 3: mod_base = cm
  modified_base 4: mod_base = um
  modified_base 5: mod_base = OTHER; note = 2'-fluoroadenosine
  modified_base 6: mod_base = um
  modified_base 7: mod_base = OTHER; note = 2'-fluorocytidine
  modified_base 8: mod_base = cm
  modified_base 9: mod_base = OTHER; note = 2'-O-methyladenosine
  modified_base 10: mod_base = gm
  modified_base 11: mod_base = cm
  modified_base 12: mod_base = gm
  modified_base 13: mod_base = OTHER; note = 2'-O-methyladenosine
  modified_base 14: mod_base = OTHER; note = 2'-fluorocytidine
  modified_base 15: mod_base = um
  modified_base 16: mod_base = OTHER; note = 2'-fluoroguanosine
  modified_base 17: mod_base = um
  modified_base 18: mod_base = gm
  modified_base 19: mod_base = OTHER; note = 2'-O-methyladenosine
  modified_base 20: mod_base = gm
  modified_base 21: mod_base = OTHER; note = 2'-O-methylcytidine with a 3'-phosphorothioate linkage
  modified_base 22: mod_base = OTHER; note = 2'-O-methyladenosine with a 3'-phosphorothioate linkage
  modified_base 23: mod_base = um
tgctatccagcgactgtgagcat

SEQ ID NO: 1516 - RNA, 21 nt, synthetic construct
  source 1..21: mol_type = other RNA
  modified_base 1: mod_base = OTHER; note = 2'-O-methylcytidine with a 3'-phosphorothioate linkage
  modified_base 2: mod_base = OTHER; note = 2'-O-methyluridine with a 3'-phosphorothioate linkage
  modified_base 3: mod_base = cm
  modified_base 4: mod_base = OTHER; note = 2'-O-methyladenosine
  modified_base 5: mod_base = cm
  modified_base 6: mod_base = OTHER; note = 2'-O-methyladenosine
  modified_base 7: mod_base = gm
  modified_base 8: mod_base = um
  modified_base 9: mod_base = OTHER; note = 2'-fluorocytidine
  modified_base 10: mod_base = OTHER; note = 2'-fluoroguanosine
  modified_base 11: mod_base = OTHER; note = 2'-fluorocytidine
  modified_base 12: mod_base = um
  modified_base 13: mod_base = gm
  modified_base 14: mod_base = gm
  modified_base 15: mod_base = OTHER; note = 2'-O-methyladenosine
  modified_base 16: mod_base = um
  modified_base 17: mod_base = OTHER; note = 2'-O-methyladenosine
  modified_base 18: mod_base = gm
  modified_base 19: mod_base = OTHER; note = 2'-O-methylcytidine with a 3'-phosphorothioate linkage
  modified_base 20: mod_base = OTHER; note = 2'-O-methyluridine with a 3'-phosphorothioate linkage
  modified_base 21: mod_base = OTHER; note = 2'-O-methyladenosine
ctcacagtcgctggatagcta

SEQ ID NO: 1517 - RNA, 23 nt, synthetic construct
  source 1..23: mol_type = other RNA
  modified_base 1: mod_base = OTHER; note = 2'-O-methyluridine with a 3'-phosphorothioate linkage and a 5'-phosphate substitution
  modified_base 2: mod_base = OTHER; note = 2'-fluoroadenosine with a 3'-phosphorothioate linkage
  modified_base 3: mod_base = gm
  modified_base 4: mod_base = cm
  modified_base 5: mod_base = OTHER; note = 2'-fluorouridine
  modified_base 6: mod_base = OTHER; note = 2'-O-methyladenosine
  modified_base 7: mod_base = OTHER; note = 2'-fluorouridine
  modified_base 8: mod_base = cm
  modified_base 9: mod_base = cm
  modified_base 10: mod_base = OTHER; note = 2'-O-methyladenosine
  modified_base 11: mod_base = gm
  modified_base 12: mod_base = cm
  modified_base 13: mod_base = gm
  modified_base 14: mod_base = OTHER; note = 2'-fluoroadenosine
  modified_base 15: mod_base = cm
  modified_base 16: mod_base = OTHER; note = 2'-fluorouridine
  modified_base 17: mod_base = gm
  modified_base 18: mod_base = um
  modified_base 19: mod_base = gm
  modified_base 20: mod_base = OTHER; note = 2'-O-methyladenosine
  modified_base 21: mod_base = OTHER; note = 2'-O-methylguanosine with a 3'-phosphorothioate linkage
  modified_base 22: mod_base = OTHER; note = 2'-O-methylcytidine with a 3'-phosphorothioate linkage
  modified_base 23: mod_base = OTHER; note = 2'-O-methyladenosine
tagctatccagcgactgtgagca

SEQ ID NO: 1518 - RNA, 21 nt, synthetic construct
  source 1..21: mol_type = other RNA
  modified_base 1: mod_base = OTHER; note = 2'-O-methyluridine with a 3'-phosphorothioate linkage
  modified_base 2: mod_base = OTHER; note = 2'-O-methylcytidine with a 3'-phosphorothioate linkage
  modified_base 3: mod_base = OTHER; note = 2'-O-methyladenosine
  modified_base 4: mod_base = cm
  modified_base 5: mod_base = OTHER; note = 2'-O-methyladenosine
  modified_base 6: mod_base = gm
  modified_base 7: mod_base = um
  modified_base 8: mod_base = cm
  modified_base 9: mod_base = OTHER; note = 2'-fluoroguanosine
  modified_base 10: mod_base = OTHER; note = 2'-fluorocytidine
  modified_base 11: mod_base = OTHER; note = 2'-fluorouridine
  modified_base 12: mod_base = gm
  modified_base 13: mod_base = gm
  modified_base 14: mod_base = OTHER; note = 2'-O-methyladenosine
  modified_base 15: mod_base = um
  modified_base 16: mod_base = OTHER; note = 2'-O-methyladenosine
  modified_base 17: mod_base = gm
  modified_base 18: mod_base = cm
  modified_base 19: mod_base = OTHER; note = 2'-O-methyluridine with a 3'-phosphorothioate linkage
  modified_base 20: mod_base = OTHER; note = 2'-O-methylguanosine with a 3'-phosphorothioate linkage
  modified_base 21: mod_base = OTHER; note = 2'-O-methyladenosine
tcacagtcgctggatagctga

SEQ ID NO: 1519 - RNA, 23 nt, synthetic construct
  source 1..23: mol_type = other RNA
  modified_base 1: mod_base = OTHER; note = 2'-O-methyluridine with a 3'-phosphorothioate linkage and a 5'-phosphate substitution
  modified_base 2: mod_base = OTHER; note = 2'-fluorocytidine with a 3'-phosphorothioate linkage
  modified_base 3: mod_base = OTHER; note = 2'-O-methyladenosine
  modified_base 4: mod_base = gm
  modified_base 5: mod_base = OTHER; note = 2'-fluorocytidine
  modified_base 6: mod_base = um
  modified_base 7: mod_base = OTHER; note = 2'-fluoroadenosine
  modified_base 8: mod_base = um
  modified_base 9: mod_base = cm
  modified_base 10: mod_base = cm
  modified_base 11: mod_base = OTHER; note = 2'-O-methyladenosine
  modified_base 12: mod_base = gm
  modified_base 13: mod_base = cm
  modified_base 14: mod_base = OTHER; note = 2'-fluoroguanosine
  modified_base 15: mod_base = OTHER; note = 2'-O-methyladenosine
  modified_base 16: mod_base = OTHER; note = 2'-fluorocytidine
  modified_base 17: mod_base = um
  modified_base 18: mod_base = gm
  modified_base 19: mod_base = um
  modified_base 20: mod_base = gm
  modified_base 21: mod_base = OTHER; note = 2'-O-methyladenosine with a 3'-phosphorothioate linkage
  modified_base 22: mod_base = OTHER; note = 2'-O-methylguanosine with a 3'-phosphorothioate linkage
  modified_base 23: mod_base = cm
tcagctatccagcgactgtgagc

SEQ ID NO: 1520 - RNA, 21 nt, synthetic construct
  source 1..21: mol_type = other RNA
  modified_base 1: mod_base = OTHER; note = 2'-O-methylcytidine with a 3'-phosphorothioate linkage
  modified_base 2: mod_base = OTHER; note = 2'-O-methyladenosine with a 3'-phosphorothioate linkage
  modified_base 3: mod_base = cm
  modified_base 4: mod_base = OTHER; note = 2'-O-methyladenosine
  modified_base 5: mod_base = gm
  modified_base 6: mod_base = um
  modified_base 7: mod_base = cm
  modified_base 8: mod_base = gm
  modified_base 9: mod_base = OTHER; note = 2'-fluorocytidine
  modified_base 10: mod_base = OTHER; note = 2'-fluorouridine
  modified_base 11: mod_base = OTHER; note = 2'-fluoroguanosine
  modified_base 12: mod_base = gm
  modified_base 13: mod_base = OTHER; note = 2'-O-methyladenosine
  modified_base 14: mod_base = um
  modified_base 15: mod_base = OTHER; note = 2'-O-methyladenosine
  modified_base 16: mod_base = gm
  modified_base 17: mod_base = cm
  modified_base 18: mod_base = um
  modified_base 19: mod_base = OTHER; note = 2'-O-methylguanosine with a 3'-phosphorothioate linkage
  modified_base 20: mod_base = OTHER; note = 2'-O-methyladenosine with a 3'-phosphorothioate linkage
  modified_base 21: mod_base = OTHER; note = 2'-O-methyladenosine
cacagtcgctggatagctgaa

SEQ ID NO: 1521 - RNA, 23 nt, synthetic construct
  source 1..23: mol_type = other RNA
  modified_base 1: mod_base = OTHER; note = 2'-O-methyluridine with a 3'-phosphorothioate linkage and a 5'-phosphate substitution
  modified_base 2: mod_base = OTHER; note = 2'-fluorouridine with a 3'-phosphorothioate linkage
  modified_base 3: mod_base = cm
  modified_base 4: mod_base = OTHER; note = 2'-O-methyladenosine
  modified_base 5: mod_base = OTHER; note = 2'-fluoroguanosine
  modified_base 6: mod_base = cm
  modified_base 7: mod_base = OTHER; note = 2'-fluorouridine
  modified_base 8: mod_base = OTHER; note = 2'-O-methyladenosine
  modified_base 9: mod_base = um
  modified_base 10: mod_base = cm
  modified_base 11: mod_base = cm
  modified_base 12: mod_base = OTHER; note = 2'-O-methyladenosine
  modified_base 13: mod_base = gm
  modified_base 14: mod_base = OTHER; note = 2'-fluorocytidine
  modified_base 15: mod_base = gm
  modified_base 16: mod_base = OTHER; note = 2'-fluoroadenosine
  modified_base 17: mod_base = cm
  modified_base 18: mod_base = um
  modified_base 19: mod_base = gm
  modified_base 20: mod_base = um
  modified_base 21: mod_base = OTHER; note = 2'-O-methylguanosine with a 3'-phosphorothioate linkage
  modified_base 22: mod_base = OTHER; note = 2'-O-methyladenosine with a 3'-phosphorothioate linkage
  modified_base 23: mod_base = gm
ttcagctatccagcgactgtgag

SEQ ID NO: 1522 - RNA, 21 nt, synthetic construct
  source 1..21: mol_type = other RNA
  modified_base 1: mod_base = OTHER; note = 2'-O-methylguanosine with a 3'-phosphorothioate linkage
  modified_base 2: mod_base = OTHER; note = 2'-O-methyladenosine with a 3'-phosphorothioate linkage
  modified_base 3: mod_base = OTHER; note = 2'-O-methyladenosine
  modified_base 4: mod_base = um
  modified_base 5: mod_base = um
  modified_base 6: mod_base = gm
  modified_base 7: mod_base = OTHER; note = 2'-O-methyladenosine
  modified_base 8: mod_base = OTHER; note = 2'-O-methyladenosine
  modified_base 9: mod_base = OTHER; note = 2'-fluorocytidine
  modified_base 10: mod_base = OTHER; note = 2'-fluorocytidine
  modified_base 11: mod_base = OTHER; note = 2'-fluoroadenosine
  modified_base 12: mod_base = OTHER; note = 2'-O-methyladenosine
  modified_base 13: mod_base = gm
  modified_base 14: mod_base = um
  modified_base 15: mod_base = gm
  modified_base 16: mod_base = um
  modified_base 17: mod_base = um
  modified_base 18: mod_base = um
  modified_base 19: mod_base = OTHER; note = 2'-O-methylcytidine with a 3'-phosphorothioate linkage
  modified_base 20: mod_base = OTHER; note = 2'-O-methylcytidine with a 3'-phosphorothioate linkage
  modified_base 21: mod_base = OTHER; note = 2'-O-methyladenosine
gaattgaaccaagtgtttcca

SEQ ID NO: 1523 - RNA, 23 nt, synthetic construct
  source 1..23: mol_type = other RNA
  modified_base 1: mod_base = OTHER; note = 2'-O-methyluridine with a 3'-phosphorothioate linkage and a 5'-phosphate substitution
  modified_base 2: mod_base = OTHER; note = 2'-fluoroguanosine with a 3'-phosphorothioate linkage
  modified_base 3: mod_base = gm
  modified_base 4: mod_base = OTHER; note = 2'-O-methyladenosine
  modified_base 5: mod_base = OTHER; note = 2'-fluoroadenosine
  modified_base 6: mod_base = OTHER; note = 2'-O-methyladenosine
  modified_base 7: mod_base = OTHER; note = 2'-fluorocytidine
  modified_base 8: mod_base = OTHER; note = 2'-O-methyladenosine
  modified_base 9: mod_base = cm
  modified_base 10: mod_base = um
  modified_base 11: mod_base = um
  modified_base 12: mod_base = gm
  modified_base 13: mod_base = gm
  modified_base 14: mod_base = OTHER; note = 2'-fluorouridine
  modified_base 15: mod_base = um
  modified_base 16: mod_base = OTHER; note = 2'-fluorocytidine
  modified_base 17: mod_base = OTHER; note = 2'-O-methyladenosine
  modified_base 18: mod_base = OTHER; note = 2'-O-methyladenosine
  modified_base 19: mod_base = um
  modified_base 20: mod_base = um
  modified_base 21: mod_base = OTHER; note = 2'-O-methylcytidine with a 3'-phosphorothioate linkage
  modified_base 22: mod_base = OTHER; note = 2'-O-methyluridine with a 3'-phosphorothioate linkage
  modified_base 23: mod_base = cm
tggaaacacttggttcaattctc

SEQ ID NO: 1524 - RNA, 21 nt, synthetic construct
  source 1..21: mol_type = other RNA
  modified_base 1: mod_base = OTHER; note = 2'-O-methylguanosine with a 3'-phosphorothioate linkage
  modified_base 2: mod_base = OTHER; note = 2'-O-methyladenosine with a 3'-phosphorothioate linkage
  modified_base 3: mod_base = OTHER; note = 2'-O-methyladenosine
  modified_base 4: mod_base = cm
  modified_base 5: mod_base = cm
  modified_base 6: mod_base = OTHER; note = 2'-O-methyladenosine
  modified_base 7: mod_base = OTHER; note = 2'-O-methyladenosine
  modified_base 8: mod_base = gm
  modified_base 9: mod_base = OTHER; note = 2'-fluorouridine
  modified_base 10: mod_base = OTHER; note = 2'-fluoroguanosine
  modified_base 11: mod_base = OTHER; note = 2'-fluorouridine
  modified_base 12: mod_base = um
  modified_base 13: mod_base = um
  modified_base 14: mod_base = cm
  modified_base 15: mod_base = cm
  modified_base 16: mod_base = cm
  modified_base 17: mod_base = um
  modified_base 18: mod_base = cm
  modified_base 19: mod_base = OTHER; note = 2'-O-methyluridine with a 3'-phosphorothioate linkage
  modified_base 20: mod_base = OTHER; note = 2'-O-methylguanosine with a 3'-phosphorothioate linkage
  modified_base 21: mod_base = OTHER; note = 2'-O-methyladenosine
gaaccaagtgtttccctctga

SEQ ID NO: 1525 - RNA, 23 nt, synthetic construct
  source 1..23: mol_type = other RNA
  modified_base 1: mod_base = OTHER; note = 2'-O-methyluridine with a 3'-phosphorothioate linkage and a 5'-phosphate substitution
  modified_base 2: mod_base = OTHER; note = 2'-fluorocytidine with a 3'-phosphorothioate linkage
  modified_base 3: mod_base = OTHER; note = 2'-O-methyladenosine
  modified_base 4: mod_base = gm
  modified_base 5: mod_base = OTHER; note = 2'-fluoroadenosine
  modified_base 6: mod_base = gm
  modified_base 7: mod_base = OTHER; note = 2'-fluoroguanosine
  modified_base 8: mod_base = gm
  modified_base 9: mod_base = OTHER; note = 2'-O-methyladenosine
  modified_base 10: mod_base = OTHER; note = 2'-O-methyladenosine
  modified_base 11: mod_base = OTHER; note = 2'-O-methyladenosine
  modified_base 12: mod_base = cm
  modified_base 13: mod_base = OTHER; note = 2'-O-methyladenosine
  modified_base 14: mod_base = OTHER; note = 2'-fluorocytidine
  modified_base 15: mod_base = um
  modified_base 16: mod_base = OTHER; note = 2'-fluorouridine
  modified_base 17: mod_base = gm
  modified_base 18: mod_base = gm
  modified_base 19: mod_base = um
  modified_base 20: mod_base = um
  modified_base 21: mod_base = OTHER; note = 2'-O-methylcytidine with a 3'-phosphorothioate linkage
  modified_base 22: mod_base = OTHER; note = 2'-O-methyladenosine with a 3'-phosphorothioate linkage
  modified_base 23: mod_base = OTHER; note = 2'-O-methyladenosine
tcagagggaaacacttggttcaa

SEQ ID NO: 1526 - RNA, 21 nt, synthetic construct
  source 1..21: mol_type = other RNA
  modified_base 1: mod_base = OTHER; note = 2'-O-methyladenosine with a 3'-phosphorothioate linkage
  modified_base 2: mod_base = OTHER; note = 2'-O-methyladenosine with a 3'-phosphorothioate linkage
  modified_base 3: mod_base = OTHER; note = 2'-O-methyladenosine
  modified_base 4: mod_base = um
  modified_base 5: mod_base = gm
  modified_base 6: mod_base = OTHER; note = 2'-O-methyladenosine
  modified_base 7: mod_base = um
  modified_base 8: mod_base = cm
  modified_base 9: mod_base = OTHER; note = 2'-fluoroadenosine
  modified_base 10: mod_base = OTHER; note = 2'-fluoroguanosine
  modified_base 11: mod_base = OTHER; note = 2'-fluorocytidine
  modified_base 12: mod_base = OTHER; note = 2'-O-methyladenosine
  modified_base 13: mod_base = um
  modified_base 14: mod_base = gm
  modified_base 15: mod_base = gm
  modified_base 16: mod_base = OTHER; note = 2'-O-methyladenosine
  modified_base 17: mod_base = um
  modified_base 18: mod_base = OTHER; note = 2'-O-methyladenosine
  modified_base 19: mod_base = OTHER; note = 2'-O-methyluridine with a 3'-phosphorothioate linkage
  modified_base 20: mod_base = OTHER; note = 2'-O-methyluridine with a 3'-phosphorothioate linkage
  modified_base 21: mod_base = OTHER; note = 2'-O-methyladenosine
aaatgatcagcatggatatta

SEQ ID NO: 1527 - RNA, 23 nt, synthetic construct
  source 1..23: mol_type = other RNA
  modified_base 1: mod_base = OTHER; note = 2'-O-methyluridine with a 3'-phosphorothioate linkage and a 5'-phosphate substitution
  modified_base 2: mod_base = OTHER; note = 2'-fluoroadenosine with a 3'-phosphorothioate linkage
  modified_base 3: mod_base = OTHER; note = 2'-O-methyladenosine
  modified_base 4: mod_base = um
  modified_base 5: mod_base = OTHER; note = 2'-fluoroadenosine
  modified_base 6: mod_base = um
  modified_base 7: mod_base = OTHER; note = 2'-fluorocytidine
  modified_base 8: mod_base = cm
  modified_base 9: mod_base = OTHER; note = 2'-O-methyladenosine
  modified_base 10: mod_base = um
  modified_base 11: mod_base = gm
  modified_base 12: mod_base = cm
  modified_base 13: mod_base = um
  modified_base 14: mod_base = OTHER; note = 2'-fluoroguanosine
  modified_base 15: mod_base = OTHER; note = 2'-O-methyladenosine
  modified_base 16: mod_base = OTHER; note = 2'-fluorouridine
  modified_base 17: mod_base = cm
  modified_base 18: mod_base = OTHER; note = 2'-O-methyladenosine
  modified_base 19: mod_base = um
  modified_base 20: mod_base = um
  modified_base 21: mod_base = OTHER; note = 2'-O-methyluridine with a 3'-phosphorothioate linkage
  modified_base 22: mod_base = OTHER; note = 2'-O-methyluridine with a 3'-phosphorothioate linkage
  modified_base 23: mod_base = OTHER; note = 2'-O-methyladenosine
taatatccatgctgatcatttta

SEQ ID NO: 1528 - RNA, 21 nt, synthetic construct
  source 1..21: mol_type = other RNA
  modified_base 1: mod_base = OTHER; note = 2'-O-methyladenosine with a 3'-phosphorothioate linkage
  modified_base 2: mod_base = OTHER; note = 2'-O-methyluridine with a 3'-phosphorothioate linkage
  modified_base 3: mod_base = gm
  modified_base 4: mod_base = OTHER; note = 2'-O-methyladenosine
  modified_base 5: mod_base = um
  modified_base 6: mod_base = cm
  modified_base 7: mod_base = OTHER; note = 2'-O-methyladenosine
  modified_base 8: mod_base = gm
  modified_base 9: mod_base = OTHER; note = 2'-fluorocytidine
  modified_base 10: mod_base = OTHER; note = 2'-fluoroadenosine
  modified_base 11: mod_base = OTHER; note = 2'-fluorouridine
  modified_base 12: mod_base = gm
  modified_base 13: mod_base = gm
  modified_base 14: mod_base = OTHER; note = 2'-O-methyladenosine
  modified_base 15: mod_base = um
  modified_base 16: mod_base = OTHER; note = 2'-O-methyladenosine
  modified_base 17: mod_base = um
  modified_base 18: mod_base = um
  modified_base 19: mod_base = OTHER; note = 2'-O-methylguanosine with a 3'-phosphorothioate linkage
  modified_base 20: mod_base = OTHER; note = 2'-O-methyladenosine with a 3'-phosphorothioate linkage
  modified_base 21: mod_base = OTHER; note = 2'-O-methyladenosine
atgatcagcatggatattgaa

SEQ ID NO: 1529 - RNA, 23 nt, synthetic construct
  source 1..23: mol_type = other RNA
  modified_base 1: mod_base = OTHER; note = 2'-O-methyluridine with a 3'-phosphorothioate linkage and a 5'-phosphate substitution
  modified_base 2: mod_base = OTHER; note = 2'-fluorouridine with a 3'-phosphorothioate linkage
  modified_base 3: mod_base = cm
  modified_base 4: mod_base = OTHER; note = 2'-O-methyladenosine
  modified_base 5: mod_base = OTHER; note = 2'-fluoroadenosine
  modified_base 6: mod_base = um
  modified_base 7: mod_base = OTHER; note = 2'-fluoroadenosine
  modified_base 8: mod_base = um
  modified_base 9: mod_base = cm
  modified_base 10: mod_base = cm
  modified_base 11: mod_base = OTHER; note = 2'-O-methyladenosine
  modified_base 12: mod_base = um
  modified_base 13: mod_base = gm
  modified_base 14: mod_base = OTHER; note = 2'-fluorocytidine
  modified_base 15: mod_base = um
  modified_base 16: mod_base = OTHER; note = 2'-fluoroguanosine
  modified_base 17: mod_base = OTHER; note = 2'-O-methyladenosine
  modified_base 18: mod_base = um
  modified_base 19: mod_base = cm
  modified_base 20: mod_base = OTHER; note = 2'-O-methyladenosine
  modified_base 21: mod_base = OTHER; note = 2'-O-methyluridine with a 3'-phosphorothioate linkage
  modified_base 22: mod_base = OTHER; note = 2'-O-methyluridine with a 3'-phosphorothioate linkage
  modified_base 23: mod_base = um
ttcaatatccatgctgatcattt

SEQ ID NO: 1530 - RNA, 21 nt, synthetic construct
  source 1..21: mol_type = other RNA
  modified_base 1: mod_base = OTHER; note = 2'-O-methyluridine with a 3'-phosphorothioate linkage
  modified_base 2: mod_base = OTHER; note = 2'-O-methylcytidine with a 3'-phosphorothioate linkage
  modified_base 3: mod_base = um
  modified_base 4: mod_base = cm
  modified_base 5: mod_base = cm
  modified_base 6: mod_base = um
  modified_base 7: mod_base = um
  modified_base 8: mod_base = cm
  modified_base 9: mod_base = OTHER; note = 2'-fluorouridine
  modified_base 10: mod_base = OTHER; note = 2'-fluoroguanosine
  modified_base 11: mod_base = OTHER; note = 2'-fluoroguanosine
  modified_base 12: mod_base = cm
  modified_base 13: mod_base = um
  modified_base 14: mod_base = gm
  modified_base 15: mod_base = um
  modified_base 16: mod_base = cm
  modified_base 17: mod_base = OTHER; note = 2'-O-methyladenosine
  modified_base 18: mod_base = OTHER; note = 2'-O-methyladenosine
  modified_base 19: mod_base = OTHER; note = 2'-O-methylguanosine with a 3'-phosphorothioate linkage
  modified_base 20: mod_base = OTHER; note = 2'-O-methyluridine with a 3'-phosphorothioate linkage
  modified_base 21: mod_base = OTHER; note = 2'-O-methyladenosine
tctccttctggctgtcaagta

SEQ ID NO: 1531 - RNA, 23 nt, synthetic construct
  source 1..23: mol_type = other RNA
  modified_base 1: mod_base = OTHER; note = 2'-O-methyluridine with a 3'-phosphorothioate linkage and a 5'-phosphate substitution
  modified_base 2: mod_base = OTHER; note = 2'-fluoroadenosine with a 3'-phosphorothioate linkage
  modified_base 3: mod_base = cm
  modified_base 4: mod_base = um
  modified_base 5: mod_base = OTHER; note = 2'-fluorouridine
  modified_base 6: mod_base = gm
  modified_base 7: mod_base = OTHER; note = 2'-fluoroadenosine
  modified_base 8: mod_base = cm
  modified_base 9: mod_base = OTHER; note = 2'-O-methyladenosine
  modified_base 10: mod_base = gm
  modified_base 11: mod_base = cm
  modified_base 12: mod_base = cm
  modified_base 13: mod_base = OTHER; note = 2'-O-methyladenosine
  modified_base 14: mod_base = OTHER; note = 2'-fluoroguanosine
  modified_base 15: mod_base = OTHER; note = 2'-O-methyladenosine
  modified_base 16: mod_base = OTHER; note = 2'-fluoroadenosine
  modified_base 17: mod_base = gm
  modified_base 18: mod_base = gm
  modified_base 19: mod_base = OTHER; note = 2'-O-methyladenosine
  modified_base 20: mod_base = gm
  modified_base 21: mod_base = OTHER; note = 2'-O-methyladenosine with a 3'-phosphorothioate linkage
  modified_base 22: mod_base = OTHER; note = 2'-O-methylguanosine with a 3'-phosphorothioate linkage
  modified_base 23: mod_base = cm
tacttgacagccagaaggagagc

SEQ ID NO: 1532 - RNA, 21 nt, synthetic construct
  source 1..21: mol_type = other RNA
  modified_base 1: mod_base = OTHER; note = 2'-O-methylcytidine with a 3'-phosphorothioate linkage
  modified_base 2: mod_base = OTHER; note = 2'-O-methyluridine with a 3'-phosphorothioate linkage
  modified_base 3: mod_base = cm
  modified_base 4: mod_base = cm
  modified_base 5: mod_base = um
  modified_base 6: mod_base = um
  modified_base 7: mod_base = cm
  modified_base 8: mod_base = um
  modified_base 9: mod_base = OTHER; note = 2'-fluoroguanosine
  modified_base 10: mod_base = OTHER; note = 2'-fluoroguanosine
  modified_base 11: mod_base = OTHER; note = 2'-fluorocytidine
  modified_base 12: mod_base = um
  modified_base 13: mod_base = gm
  modified_base 14: mod_base = um
  modified_base 15: mod_base = cm
  modified_base 16: mod_base = OTHER; note = 2'-O-methyladenosine
  modified_base 17: mod_base = OTHER; note = 2'-O-methyladenosine
  modified_base 18: mod_base = gm
  modified_base 19: mod_base = OTHER; note = 2'-O-methyluridine with a 3'-phosphorothioate linkage
  modified_base 20: mod_base = OTHER; note = 2'-O-methyladenosine with a 3'-phosphorothioate linkage
  modified_base 21: mod_base = OTHER; note = 2'-O-methyladenosine
ctccttctggctgtcaagtaa

SEQ ID NO: 1533 - RNA, 23 nt, synthetic construct
  source 1..23: mol_type = other RNA
  modified_base 1: mod_base = OTHER; note = 2'-O-methyluridine with a 3'-phosphorothioate linkage and a 5'-phosphate substitution
  modified_base 2: mod_base = OTHER; note = 2'-fluorouridine with a 3'-phosphorothioate linkage
  modified_base 3: mod_base = OTHER; note = 2'-O-methyladenosine
  modified_base 4: mod_base = cm
  modified_base 5: mod_base = OTHER; note = 2'-fluorouridine
  modified_base 6: mod_base = um
  modified_base 7: mod_base = OTHER; note = 2'-fluoroguanosine
  modified_base 8: mod_base = OTHER; note = 2'-O-methyladenosine
  modified_base 9: mod_base = cm
  modified_base 10: mod_base = OTHER; note = 2'-O-methyladenosine
  modified_base 11: mod_base = gm
  modified_base 12: mod_base = cm
  modified_base 13: mod_base = cm
  modified_base 14: mod_base = OTHER; note = 2'-fluoroadenosine
  modified_base 15: mod_base = gm
  modified_base 16: mod_base = OTHER; note = 2'-fluoroadenosine
  modified_base 17: mod_base = OTHER; note = 2'-O-methyladenosine
  modified_base 18: mod_base = gm
  modified_base 19: mod_base = gm
  modified_base 20: mod_base = OTHER; note = 2'-O-methyladenosine
  modified_base 21: mod_base = OTHER; note = 2'-O-methylguanosine with a 3'-phosphorothioate linkage
  modified_base 22: mod_base = OTHER; note = 2'-O-methyladenosine with a 3'-phosphorothioate linkage
  modified_base 23: mod_base = gm
ttacttgacagccagaaggagag

SEQ ID NO: 1534 - RNA, 21 nt, synthetic construct
  source 1..21: mol_type = other RNA
  modified_base 1: mod_base = OTHER; note = 2'-O-methyladenosine with a 3'-phosphorothioate linkage
  modified_base 2: mod_base = OTHER; note = 2'-O-methyladenosine with a 3'-phosphorothioate linkage
  modified_base 3: mod_base = cm
  modified_base 4: mod_base = OTHER; note = 2'-O-methyladenosine
  modified_base 5: mod_base = gm
  modified_base 6: mod_base = OTHER; note = 2'-O-methyladenosine
  modified_base 7: mod_base = gm
  modified_base 8: mod_base = OTHER; note = 2'-O-methyladenosine
  modified_base 9: mod_base = OTHER; note = 2'-fluorocytidine
  modified_base 10: mod_base = OTHER; note = 2'-fluoroadenosine
  modified_base 11: mod_base = OTHER; note = 2'-fluoroguanosine
  modified_base 12: mod_base = OTHER; note = 2'-O-methyladenosine
  modified_base 13: mod_base = OTHER; note = 2'-O-methyladenosine
  modified_base 14: mod_base = um
  modified_base 15: mod_base = cm
  modified_base 16: mod_base = um
  modified_base 17: mod_base = OTHER; note = 2'-O-methyladenosine
  modified_base 18: mod_base = cm
  modified_base 19: mod_base = OTHER; note = 2'-O-methyladenosine with a 3'-phosphorothioate linkage
  modified_base 20: mod_base = OTHER; note = 2'-O-methylcytidine with a 3'-phosphorothioate linkage
  modified_base 21: mod_base = OTHER; note = 2'-O-methyladenosine
aacagagacagaatctacaca

SEQ ID NO: 1535 - RNA, 23 nt, synthetic construct
  source 1..23: mol_type = other RNA
  modified_base 1: mod_base = OTHER; note = 2'-O-methyluridine with a 3'-phosphorothioate linkage and a 5'-phosphate substitution
  modified_base 2: mod_base = OTHER; note = 2'-fluoroguanosine with a 3'-phosphorothioate linkage
  modified_base 3: mod_base = um
  modified_base 4: mod_base = gm
  modified_base 5: mod_base = OTHER; note = 2'-fluorouridine
  modified_base 6: mod_base = OTHER; note = 2'-O-methyladenosine
  modified_base 7: mod_base = OTHER; note = 2'-fluoroguanosine
  modified_base 8: mod_base = OTHER; note = 2'-O-methyladenosine
  modified_base 9: mod_base = um
  modified_base 10: mod_base = um
  modified_base 11: mod_base = cm
  modified_base 12: mod_base = um
  modified_base 13: mod_base = gm
  modified_base 14: mod_base = OTHER; note = 2'-fluorouridine
  modified_base 15: mod_base = cm
  modified_base 16: mod_base = OTHER; note = 2'-fluorouridine
  modified_base 17: mod_base = cm
  modified_base 18: mod_base = um
  modified_base 19: mod_base = gm
  modified_base 20: mod_base = um
  modified_base 21: mod_base = OTHER; note = 2'-O-methyluridine with a 3'-phosphorothioate linkage
  modified_base 22: mod_base = OTHER; note = 2'-O-methyluridine with a 3'-phosphorothioate linkage
  modified_base 23: mod_base = gm
tgtgtagattctgtctctgtttg

SEQ ID NO: 1536 - RNA, 21 nt, synthetic construct
  source 1..21: mol_type = other RNA
  modified_base 1: mod_base = OTHER; note = 2'-O-methyladenosine with a 3'-phosphorothioate linkage
  modified_base 2: mod_base = OTHER; note = 2'-O-methylcytidine with a 3'-phosphorothioate linkage
  modified_base 3: mod_base = OTHER; note = 2'-O-methyladenosine
  modified_base 4: mod_base = gm
  modified_base 5: mod_base = OTHER; note = 2'-O-methyladenosine
  modified_base 6: mod_base = gm
  modified_base 7: mod_base = OTHER; note = 2'-O-methyladenosine
  modified_base 8: mod_base = cm
  modified_base 9: mod_base = OTHER; note = 2'-fluoroadenosine
  modified_base 10: mod_base = OTHER; note = 2'-fluoroguanosine
  modified_base 11: mod_base = OTHER; note = 2'-fluoroadenosine
  modified_base 12: mod_base = OTHER; note = 2'-O-methyladenosine
  modified_base 13: mod_base = um
  modified_base 14: mod_base = cm
  modified_base 15: mod_base = um
  modified_base 16: mod_base = OTHER; note = 2'-O-methyladenosine
  modified_base 17: mod_base = cm
  modified_base 18: mod_base = OTHER; note = 2'-O-methyladenosine
  modified_base 19: mod_base = OTHER; note = 2'-O-methylcytidine with a 3'-phosphorothioate linkage
  modified_base 20: mod_base = OTHER; note = 2'-O-methyluridine with a 3'-phosphorothioate linkage
  modified_base 21: mod_base = OTHER; note = 2'-O-methyladenosine
acagagacagaatctacacta

SEQ ID NO: 1537 - RNA, 23 nt, synthetic construct
  source 1..23: mol_type = other RNA
  modified_base 1: mod_base = OTHER; note = 2'-O-methyluridine with a 3'-phosphorothioate linkage and a 5'-phosphate substitution
  modified_base 2: mod_base = OTHER; note = 2'-fluoroadenosine with a 3'-phosphorothioate linkage
  modified_base 3: mod_base = gm
  modified_base 4: mod_base = um
  modified_base 5: mod_base = OTHER; note = 2'-fluoroguanosine
  modified_base 6: mod_base = um
  modified_base 7: mod_base = OTHER; note = 2'-fluoroadenosine
  modified_base 8: mod_base = gm
  modified_base 9: mod_base = OTHER; note = 2'-O-methyladenosine
  modified_base 10: mod_base = um
  modified_base 11: mod_base = um
  modified_base 12: mod_base = cm
  modified_base 13: mod_base = um
  modified_base 14: mod_base = OTHER; note = 2'-fluoroguanosine
  modified_base 15: mod_base = um
  modified_base 16: mod_base = OTHER; note = 2'-fluorocytidine
  modified_base 17: mod_base = um
  modified_base 18: mod_base = cm
  modified_base 19: mod_base = um
  modified_base 20: mod_base = gm
  modified_base 21: mod_base = OTHER; note = 2'-O-methyluridine with a 3'-phosphorothioate linkage
  modified_base 22: mod_base = OTHER; note = 2'-O-methyluridine with a 3'-phosphorothioate linkage
  modified_base 23: mod_base = um
tagtgtagattctgtctctgttt

SEQ ID NO: 1538 - RNA, 21 nt, synthetic construct
  source 1..21: mol_type = other RNA
  modified_base 1: mod_base = OTHER; note = 2'-O-methyladenosine with a 3'-phosphorothioate linkage
  modified_base 2: mod_base = OTHER; note = 2'-O-methyluridine with a 3'-phosphorothioate linkage
  modified_base 3: mod_base = um
  modified_base 4: mod_base = gm
  modified_base 5: mod_base = um
  modified_base 6: mod_base = um
  modified_base 7: mod_base = gm
  modified_base 8: mod_base = um
  modified_base 9: mod_base = OTHER; note = 2'-fluoroadenosine
  modified_base 10: mod_base = OTHER; note = 2'-fluoroguanosine
  modified_base 11: mod_base = OTHER; note = 2'-fluoroadenosine
  modified_base 12: mod_base = cm
  modified_base 13: mod_base = gm
  modified_base 14: mod_base = um
  modified_base 15: mod_base = gm
  modified_base 16: mod_base = OTHER; note = 2'-O-methyladenosine
  modified_base 17: mod_base = OTHER; note = 2'-O-methyladenosine
  modified_base 18: mod_base = cm
  modified_base 19: mod_base = OTHER; note = 2'-O-methylcytidine with a 3'-phosphorothioate linkage
  modified_base 20: mod_base = OTHER; note = 2'-O-methyluridine with a 3'-phosphorothioate linkage
  modified_base 21: mod_base = OTHER; note = 2'-O-methyladenosine
attgttgtagacgtgaaccta

SEQ ID NO: 1539 - RNA, 23 nt, synthetic construct
  source 1..23: mol_type = other RNA
  modified_base 1: mod_base = OTHER; note = 2'-O-methyluridine with a 3'-phosphorothioate linkage and a 5'-phosphate substitution
  modified_base 2: mod_base = OTHER; note = 2'-fluoroadenosine with a 3'-phosphorothioate linkage
  modified_base 3: mod_base = gm
  modified_base 4: mod_base = gm
  modified_base 5: mod_base = OTHER; note = 2'-fluorouridine
  modified_base 6: mod_base = um
  modified_base 7: mod_base = OTHER; note = 2'-fluorocytidine
  modified_base 8: mod_base = OTHER; note = 2'-O-methyladenosine
  modified_base 9: mod_base = cm
  modified_base 10: mod_base = gm
  modified_base 11: mod_base = um
  modified_base 12: mod_base = cm
  modified_base 13: mod_base = um
  modified_base 14: mod_base = OTHER; note = 2'-fluoroadenosine
  modified_base 15: mod_base = cm
  modified_base 16: mod_base = OTHER; note = 2'-fluoroadenosine
  modified_base 17: mod_base = OTHER; note = 2'-O-methyladenosine
  modified_base 18: mod_base = cm
  modified_base 19: mod_base = OTHER; note = 2'-O-methyladenosine
  modified_base 20: mod_base = OTHER; note = 2'-O-methyladenosine
  modified_base 21: mod_base = OTHER; note = 2'-O-methyluridine with a 3'-phosphorothioate linkage
  modified_base 22: mod_base = OTHER; note = 2'-O-methyluridine with a 3'-phosphorothioate linkage
  modified_base 23: mod_base = gm
taggttcacgtctacaacaattg

SEQ ID NO: 1540 - RNA, 21 nt, synthetic construct
  source 1..21: mol_type = other RNA
  modified_base 1: mod_base = OTHER; note = 2'-O-methyladenosine with a 3'-phosphorothioate linkage
  modified_base 2: mod_base = OTHER; note = 2'-O-methyladenosine with a 3'-phosphorothioate linkage
  modified_base 3: mod_base = gm
  modified_base 4: mod_base = um
  modified_base 5: mod_base = um
  modified_base 6: mod_base = gm
  modified_base 7: mod_base = OTHER; note = 2'-O-methyladenosine
  modified_base 8: mod_base = gm
  modified_base 9: mod_base = OTHER; note = 2'-fluoroguanosine
  modified_base 10: mod_base = OTHER; note = 2'-fluorouridine
  modified_base 11: mod_base = OTHER; note = 2'-fluorouridine
  modified_base 12: mod_base = OTHER; note = 2'-O-methyladenosine
  modified_base 13: mod_base = um
  modified_base 14: mod_base = OTHER; note = 2'-O-methyladenosine
  modified_base 15: mod_base = OTHER; note = 2'-O-methyladenosine
  modified_base 16: mod_base = OTHER; note = 2'-O-methyladenosine
  modified_base 17: mod_base = OTHER; note = 2'-O-methyladenosine
  modified_base 18: mod_base = cm
  modified_base 19: mod_base = OTHER; note = 2'-O-methylcytidine with a 3'-phosphorothioate linkage
  modified_base 20: mod_base = OTHER; note = 2'-O-methylcytidine with a 3'-phosphorothioate linkage
  modified_base 21: mod_base = OTHER; note = 2'-O-methyladenosine
aagttgaggttataaaaccca

SEQ ID NO: 1541 - RNA, 23 nt, synthetic construct
  source 1..23: mol_type = other RNA
  modified_base 1: mod_base = OTHER; note = 2'-O-methyluridine with a 3'-phosphorothioate linkage and a 5'-phosphate substitution
  modified_base 2: mod_base = OTHER; note = 2'-fluoroguanosine with a 3'-phosphorothioate linkage
  modified_base 3: mod_base = gm
  modified_base 4: mod_base = gm
  modified_base 5: mod_base = OTHER; note = 2'-fluorouridine
  modified_base 6: mod_base = um
  modified_base 7: mod_base = OTHER; note = 2'-fluorouridine
  modified_base 8: mod_base = um
  modified_base 9: mod_base = OTHER; note = 2'-O-methyladenosine
  modified_base 10: mod_base = um
  modified_base 11: mod_base = OTHER; note = 2'-O-methyladenosine
  modified_base 12: mod_base = OTHER; note = 2'-O-methyladenosine
  modified_base 13: mod_base = cm
  modified_base 14: mod_base = OTHER; note = 2'-fluorocytidine
  modified_base 15: mod_base = um
  modified_base 16: mod_base = OTHER; note = 2'-fluorocytidine
  modified_base 17: mod_base = OTHER; note = 2'-O-methyladenosine
  modified_base 18: mod_base = OTHER; note = 2'-O-methyladenosine
  modified_base 19: mod_base = cm
  modified_base 20: mod_base = um
  modified_base 21: mod_base = OTHER; note = 2'-O-methyluridine with a 3'-phosphorothioate linkage
  modified_base 22: mod_base = OTHER; note = 2'-O-methyluridine with a 3'-phosphorothioate linkage
  modified_base 23: mod_base = um
tgggttttataacctcaactttt

SEQ ID NO: 1542 - RNA, 21 nt, synthetic construct
  source 1..21: mol_type = other RNA
  modified_base 1: mod_base = OTHER; note = 2'-O-methylguanosine with a 3'-phosphorothioate linkage
  modified_base 2: mod_base = OTHER; note = 2'-O-methyluridine with a 3'-phosphorothioate linkage
  modified_base 3: mod_base = um
  modified_base 4: mod_base = gm
  modified_base 5: mod_base = OTHER; note = 2'-O-methyladenosine
  modified_base 6: mod_base = gm
  modified_base 7: mod_base = gm
  modified_base 8: mod_base = um
  modified_base 9: mod_base = OTHER; note = 2'-fluorouridine
  modified_base 10: mod_base = OTHER; note = 2'-fluoroadenosine
  modified_base 11: mod_base = OTHER; note = 2'-fluorouridine
  modified_base 12: mod_base = OTHER; note = 2'-O-methyladenosine
  modified_base 13: mod_base = OTHER; note = 2'-O-methyladenosine
  modified_base 14: mod_base = OTHER; note = 2'-O-methyladenosine
  modified_base 15: mod_base = OTHER; note = 2'-O-methyladenosine
  modified_base 16: mod_base = cm
  modified_base 17: mod_base = cm
  modified_base 18: mod_base = cm
  modified_base 19: mod_base = OTHER; note = 2'-O-methyluridine with a 3'-phosphorothioate linkage
  modified_base 20: mod_base = OTHER; note = 2'-O-methyluridine with a 3'-phosphorothioate linkage
  modified_base 21: mod_base = OTHER; note = 2'-O-methyladenosine
gttgaggttataaaaccctta

SEQ ID NO: 1543 - RNA, 23 nt, synthetic construct
  source 1..23: mol_type = other RNA
  modified_base 1: mod_base = OTHER; note = 2'-O-methyluridine with a 3'-phosphorothioate linkage and a 5'-phosphate substitution
  modified_base 2: mod_base = OTHER; note = 2'-fluoroadenosine with a 3'-phosphorothioate linkage
  modified_base 3: mod_base = OTHER; note = 2'-O-methyladenosine
  modified_base 4: mod_base = gm
  modified_base 5: mod_base = OTHER; note = 2'-fluoroguanosine
  modified_base 6: mod_base = gm
  modified_base 7: mod_base = OTHER; note = 2'-fluorouridine
  modified_base 8: mod_base = um
  modified_base 9: mod_base = um
  modified_base 10: mod_base = um
  modified_base 11: mod_base = OTHER; note = 2'-O-methyladenosine
  modified_base 12: mod_base = um
  modified_base 13: mod_base = OTHER; note = 2'-O-methyladenosine
  modified_base 14: mod_base = OTHER; note = 2'-fluoroadenosine
  modified_base 15: mod_base = cm
  modified_base 16: mod_base = OTHER; note = 2'-fluorocytidine
  modified_base 17: mod_base = um
  modified_base 18: mod_base = cm
  modified_base 19: mod_base = OTHER; note = 2'-O-methyladenosine
  modified_base 20: mod_base = OTHER; note = 2'-O-methyladenosine
  modified_base 21: mod_base = OTHER; note = 2'-O-methylcytidine with a 3'-phosphorothioate linkage
  modified_base 22: mod_base = OTHER; note = 2'-O-methyluridine with a 3'-phosphorothioate linkage
  modified_base 23: mod_base = um
taagggttttataacctcaactt

SEQ ID NO: 1544 - RNA, 21 nt, synthetic construct
  source 1..21: mol_type = other RNA
  modified_base 1: mod_base = OTHER; note = 2'-O-methyluridine with a 3'-phosphorothioate linkage
  modified_base 2: mod_base = OTHER; note = 2'-O-methyluridine with a 3'-phosphorothioate linkage
  modified_base 3: mod_base = gm
  modified_base 4: mod_base = OTHER; note = 2'-O-methyladenosine
  modified_base 5: mod_base = gm
  modified_base 6: mod_base = gm
  modified_base 7: mod_base = um
  modified_base 8: mod_base = um
  modified_base 9: mod_base = OTHER; note = 2'-fluoroadenosine
  modified_base 10: mod_base = OTHER; note = 2'-fluorouridine
  modified_base 11: mod_base = OTHER; note = 2'-fluoroadenosine
  modified_base 12: mod_base = OTHER; note = 2'-O-methyladenosine
  modified_base 13: mod_base = OTHER; note = 2'-O-methyladenosine
  modified_base 14: mod_base = OTHER; note = 2'-O-methyladenosine
  modified_base 15: mod_base = cm
  modified_base 16: mod_base = cm
  modified_base 17: mod_base = cm
  modified_base 18: mod_base = um
  modified_base 19: mod_base = OTHER; note = 2'-O-methyluridine with a 3'-phosphorothioate linkage
  modified_base 20: mod_base = OTHER; note = 2'-O-methyladenosine with a 3'-phosphorothioate linkage
  modified_base 21: mod_base = OTHER; note = 2'-O-methyladenosine
ttgaggttataaaacccttaa

SEQ ID NO: 1545 - RNA, 23 nt, synthetic construct
  source 1..23: mol_type = other RNA
  modified_base 1: mod_base = OTHER; note = 2'-O-methyluridine with a 3'-phosphorothioate linkage and a 5'-phosphate substitution
  modified_base 2: mod_base = OTHER; note = 2'-fluorouridine with a 3'-phosphorothioate linkage
  modified_base 3: mod_base = OTHER; note = 2'-O-methyladenosine
  modified_base 4: mod_base = OTHER; note = 2'-O-methyladenosine
  modified_base 5: mod_base = OTHER; note = 2'-fluoroguanosine
  modified_base 6: mod_base = gm
  modified_base 7: mod_base = OTHER; note = 2'-fluoroguanosine
  modified_base 8: mod_base = um
  modified_base 9: mod_base = um
  modified_base 10: mod_base = um
  modified_base 11: mod_base = um
  modified_base 12: mod_base = OTHER; note = 2'-O-methyladenosine
  modified_base 13: mod_base = um
  modified_base 14: mod_base = OTHER; note = 2'-fluoroadenosine
  modified_base 15: mod_base = OTHER; note = 2'-O-methyladenosine
  modified_base 16: mod_base = OTHER; note = 2'-fluorocytidine
  modified_base 17: mod_base = cm
  modified_base 18: mod_base = um
  modified_base 19: mod_base = cm
  modified_base 20: mod_base = OTHER; note = 2'-O-methyladenosine
  modified_base 21: mod_base = OTHER; note = 2'-O-methyladenosine with a 3'-phosphorothioate linkage
  modified_base 22: mod_base = OTHER; note = 2'-O-methylcytidine with a 3'-phosphorothioate linkage
  modified_base 23: mod_base = um
ttaagggttttataacctcaact

SEQ ID NO: 1546 - RNA, 21 nt, synthetic construct
  source 1..21: mol_type = other RNA
  modified_base 1: mod_base = OTHER; note = 2'-O-methyluridine with a 3'-phosphorothioate linkage
  modified_base 2: mod_base = OTHER; note = 2'-O-methylguanosine with a 3'-phosphorothioate linkage
  modified_base 3: mod_base = OTHER; note = 2'-O-methyladenosine
  modified_base 4: mod_base = gm
  modified_base 5: mod_base = gm
  modified_base 6: mod_base = um
  modified_base 7: mod_base = um
  modified_base 8: mod_base = OTHER; note = 2'-O-methyladenosine
  modified_base 9: mod_base = OTHER; note = 2'-fluorouridine
  modified_base 10: mod_base = OTHER; note = 2'-fluoroadenosine
  modified_base 11: mod_base = OTHER; note = 2'-fluoroadenosine
  modified_base 12: mod_base = OTHER; note = 2'-O-methyladenosine
  modified_base 13: mod_base = OTHER; note = 2'-O-methyladenosine
  modified_base 14: mod_base = cm
  modified_base 15: mod_base = cm
  modified_base 16: mod_base = cm
  modified_base 17: mod_base = um
  modified_base 18: mod_base = um
  modified_base 19: mod_base = OTHER; note = 2'-O-methyladenosine with a 3'-phosphorothioate linkage
  modified_base 20: mod_base = OTHER; note = 2'-O-methylguanosine with a 3'-phosphorothioate linkage
  modified_base 21: mod_base = OTHER; note = 2'-O-methyladenosine
tgaggttataaaacccttaga

SEQ ID NO: 1547 - RNA, 23 nt, synthetic construct
  source 1..23: mol_type = other RNA
  modified_base 1: mod_base = OTHER; note = 2'-O-methyluridine with a 3'-phosphorothioate linkage and a 5'-phosphate substitution
  modified_base 2: mod_base = OTHER; note = 2'-fluorocytidine with a 3'-phosphorothioate linkage
  modified_base 3: mod_base = um
  modified_base 4: mod_base = OTHER; note = 2'-O-methyladenosine
  modified_base 5: mod_base = OTHER; note = 2'-fluoroadenosine
  modified_base 6: mod_base = gm
  modified_base 7: mod_base = OTHER; note = 2'-fluoroguanosine
  modified_base 8: mod_base = gm
  modified_base 9: mod_base = um
  modified_base 10: mod_base = um
  modified_base 11: mod_base = um
  modified_base 12: mod_base = um
  modified_base 13: mod_base = OTHER; note = 2'-O-methyladenosine
  modified_base 14: mod_base = OTHER; note = 2'-fluorouridine
  modified_base 15: mod_base = OTHER; note = 2'-O-methyladenosine
  modified_base 16: mod_base = OTHER; note = 2'-fluoroadenosine
  modified_base 17: mod_base = cm
  modified_base 18: mod_base = cm
  modified_base 19: mod_base = um
  modified_base 20: mod_base = cm
  modified_base 21: mod_base = OTHER; note = 2'-O-methyladenosine with a 3'-phosphorothioate linkage
  modified_base 22: mod_base = OTHER; note = 2'-O-methyladenosine with a 3'-phosphorothioate linkage
  modified_base 23: mod_base = cm
tctaagggttttataacctcaac

SEQ ID NO: 1548 - RNA, 21 nt, synthetic construct
  source 1..21: mol_type = other RNA
  modified_base 1: mod_base = OTHER; note = 2'-O-methylguanosine with a 3'-phosphorothioate linkage
  modified_base 2: mod_base = OTHER; note = 2'-O-methylcytidine with a 3'-phosphorothioate linkage
  modified_base 3: mod_base = OTHER; note = 2'-O-methyladenosine
  modified_base 4: mod_base = gm
  modified_base 5: mod_base = OTHER; note = 2'-O-methyladenosine
  modified_base 6: mod_base = gm
  modified_base 7: mod_base = OTHER; note = 2'-O-methyladenosine
  modified_base 8: mod_base = OTHER; note = 2'-O-methyladenosine
  modified_base 9: mod_base = OTHER; note = 2'-fluoroadenosine
  modified_base 10: mod_base = OTHER; note = 2'-fluoroguanosine
  modified_base 11: mod_base = OTHER; note = 2'-fluoroguanosine
  modified_base 12: mod_base = um
  modified_base 13: mod_base = gm
  modified_base 14: mod_base = cm
  modified_base 15: mod_base = OTHER; note = 2'-O-methyladenosine
  modified_base 16: mod_base = OTHER; note = 2'-O-methyladenosine
  modified_base 17: mod_base = OTHER; note = 2'-O-methyladenosine
  modified_base 18: mod_base = OTHER; note = 2'-O-methyladenosine
  modified_base 19: mod_base = OTHER; note = 2'-O-methyluridine with a 3'-phosphorothioate linkage
  modified_base 20: mod_base = OTHER; note = 2'-O-methyluridine with a 3'-phosphorothioate linkage
  modified_base 21: mod_base = OTHER; note = 2'-O-methyladenosine
gcagagaaaggtgcaaaatta

SEQ ID NO: 1549 - RNA, 23 nt, synthetic construct
  source 1..23: mol_type = other RNA
  modified_base 1: mod_base = OTHER; note = 2'-O-methyluridine with a 3'-phosphorothioate linkage and a 5'-phosphate substitution
  modified_base 2: mod_base = OTHER; note = 2'-fluoroadenosine with a 3'-phosphorothioate linkage
  modified_base 3: mod_base = OTHER; note = 2'-O-methyladenosine
  modified_base 4: mod_base = um
  modified_base 5: mod_base = OTHER; note = 2'-fluorouridine
  modified_base 6: mod_base = um
  modified_base 7: mod_base = OTHER; note = 2'-fluorouridine
  modified_base 8: mod_base = gm
  modified_base 9: mod_base = cm
  modified_base 10: mod_base = OTHER; note = 2'-O-methyladenosine
  modified_base 11: mod_base = cm
  modified_base 12: mod_base = cm
  modified_base 13: mod_base = um
  modified_base 14: mod_base = OTHER; note = 2'-fluorouridine
  modified_base 15: mod_base = um
  modified_base 16: mod_base = OTHER; note = 2'-fluorocytidine
  modified_base 17: mod_base = um
  modified_base 18: mod_base = cm
  modified_base 19: mod_base = um
  modified_base 20: mod_base = gm
  modified_base 21: mod_base = OTHER; note = 2'-O-methylcytidine with a 3'-phosphorothioate linkage
  modified_base 22: mod_base = OTHER; note = 2'-O-methyladenosine with a 3'-phosphorothioate linkage
  modified_base 23: mod_base = um
taattttgcacctttctctgcat

SEQ ID NO: 1550 - RNA, 21 nt, synthetic construct
  source 1..21: mol_type = other RNA
  modified_base 1: mod_base = OTHER; note = 2'-O-methylcytidine with a 3'-phosphorothioate linkage
  modified_base 2: mod_base = OTHER; note = 2'-O-methyladenosine with a 3'-phosphorothioate linkage
  modified_base 3: mod_base = gm
  modified_base 4: mod_base = OTHER; note = 2'-O-methyladenosine
  modified_base 5: mod_base = gm
  modified_base 6: mod_base = OTHER; note = 2'-O-methyladenosine
  modified_base 7: mod_base = OTHER; note = 2'-O-methyladenosine
  modified_base 8: mod_base = OTHER; note = 2'-O-methyladenosine
  modified_base 9: mod_base = OTHER; note = 2'-fluoroguanosine
  modified_base 10: mod_base = OTHER; note = 2'-fluoroguanosine
  modified_base 11: mod_base = OTHER; note = 2'-fluorouridine
  modified_base 12: mod_base = gm
  modified_base 13: mod_base = cm
  modified_base 14: mod_base = OTHER; note = 2'-O-methyladenosine
  modified_base 15: mod_base = OTHER; note = 2'-O-methyladenosine
  modified_base 16: mod_base = OTHER; note = 2'-O-methyladenosine
  modified_base 17: mod_base = OTHER; note = 2'-O-methyladenosine
  modified_base 18: mod_base = um
  modified_base 19: mod_base = OTHER; note = 2'-O-methyluridine with a 3'-phosphorothioate linkage
  modified_base 20: mod_base = OTHER; note = 2'-O-methylcytidine with a 3'-phosphorothioate linkage
  modified_base 21: mod_base = OTHER; note = 2'-O-methyladenosine
cagagaaaggtgcaaaattca

SEQ ID NO: 1551 - RNA, 23 nt, synthetic construct
  source 1..23: mol_type = other RNA
  modified_base 1: mod_base = OTHER; note = 2'-O-methyluridine with a 3'-phosphorothioate linkage and a 5'-phosphate substitution
  modified_base 2: mod_base = OTHER; note = 2'-fluoroguanosine with a 3'-phosphorothioate linkage
  modified_base 3: mod_base = OTHER; note = 2'-O-methyladenosine
  modified_base 4: mod_base = OTHER; note = 2'-O-methyladenosine
  modified_base 5: mod_base = OTHER; note = 2'-fluorouridine
  modified_base 6: mod_base = um
  modified_base 7: mod_base = OTHER; note = 2'-fluorouridine
  modified_base 8: mod_base = um
  modified_base 9: mod_base = gm
  modified_base 10: mod_base = cm
  modified_base 11: mod_base = OTHER; note = 2'-O-methyladenosine
  modified_base 12: mod_base = cm
  modified_base 13: mod_base = cm
  modified_base 14: mod_base = OTHER; note = 2'-fluorouridine
  modified_base 15: mod_base = um
  modified_base 16: mod_base = OTHER; note = 2'-fluorouridine
  modified_base 17: mod_base = cm
  modified_base 18: mod_base = um
  modified_base 19: mod_base = cm
  modified_base 20: mod_base = um
  modified_base 21: mod_base = OTHER; note = 2'-O-methylguanosine with a 3'-phosphorothioate linkage
  modified_base 22: mod_base = OTHER; note = 2'-O-methylcytidine with a 3'-phosphorothioate linkage
  modified_base 23: mod_base = OTHER; note = 2'-O-methyladenosine
tgaattttgcacctttctctgca

SEQ ID NO: 1552 - RNA, 21 nt, synthetic construct
  source 1..21: mol_type = other RNA
  modified_base 1: mod_base = OTHER; note = 2'-O-methyladenosine with a 3'-phosphorothioate linkage
  modified_base 2: mod_base = OTHER; note = 2'-O-methylguanosine with a 3'-phosphorothioate linkage
  modified_base 3: mod_base = OTHER; note = 2'-O-methyladenosine
  modified_base 4: mod_base = gm
  modified_base 5: mod_base = OTHER; note = 2'-O-methyladenosine
  modified_base 6: mod_base = OTHER; note = 2'-O-methyladenosine
  modified_base 7: mod_base = OTHER; note = 2'-O-methyladenosine
  modified_base 8: mod_base = gm
  modified_base 9: mod_base = OTHER; note = 2'-fluoroguanosine
  modified_base 10: mod_base = OTHER; note = 2'-fluorouridine
  modified_base 11: mod_base = OTHER; note = 2'-fluoroguanosine
  modified_base 12: mod_base = cm
  modified_base 13: mod_base = OTHER; note = 2'-O-methyladenosine
  modified_base 14: mod_base = OTHER; note = 2'-O-methyladenosine
  modified_base 15: mod_base = OTHER; note = 2'-O-methyladenosine
  modified_base 16: mod_base = OTHER; note = 2'-O-methyladenosine
  modified_base 17: mod_base = um
  modified_base 18: mod_base = um
  modified_base 19: mod_base = OTHER; note = 2'-O-methylcytidine with a 3'-phosphorothioate linkage
  modified_base 20: mod_base = OTHER; note = 2'-O-methylcytidine with a 3'-phosphorothioate linkage
  modified_base 21: mod_base = OTHER; note = 2'-O-methyladenosine
agagaaaggtgcaaaattcca

SEQ ID NO: 1553 - RNA, 23 nt, synthetic construct
  source 1..23: mol_type = other RNA
  modified_base 1: mod_base = OTHER; note = 2'-O-methyluridine with a 3'-phosphorothioate linkage and a 5'-phosphate substitution
  modified_base 2: mod_base = OTHER; note = 2'-fluoroguanosine with a 3'-phosphorothioate linkage
  modified_base 3: mod_base = gm
  modified_base 4: mod_base = OTHER; note = 2'-O-methyladenosine
  modified_base 5: mod_base = OTHER; note = 2'-fluoroadenosine
  modified_base 6: mod_base = um
  modified_base 7: mod_base = OTHER; note = 2'-fluorouridine
  modified_base 8: mod_base = um
  modified_base 9: mod_base = um
  modified_base 10: mod_base = gm
  modified_base 11: mod_base = cm
  modified_base 12: mod_base = OTHER; note = 2'-O-methyladenosine
  modified_base 13: mod_base = cm
  modified_base 14: mod_base = OTHER; note = 2'-fluorocytidine
  modified_base 15: mod_base = um
  modified_base 16: mod_base = OTHER; note = 2'-fluorouridine
  modified_base 17: mod_base = um
  modified_base 18: mod_base = cm
  modified_base 19: mod_base = um
  modified_base 20: mod_base = cm
  modified_base 21: mod_base = OTHER; note = 2'-O-methyluridine with a 3'-phosphorothioate linkage
  modified_base 22: mod_base = OTHER; note = 2'-O-methylguanosine with a 3'-phosphorothioate linkage
  modified_base 23: mod_base = cm
tggaattttgcacctttctctgc

SEQ ID NO: 1554 - RNA, 21 nt, synthetic construct
  source 1..21: mol_type = other RNA
  modified_base 1: mod_base = OTHER; note = 2'-O-methylguanosine with a 3'-phosphorothioate linkage
  modified_base 2: mod_base = OTHER; note = 2'-O-methyladenosine with a 3'-phosphorothioate linkage
  modified_base 3: mod_base = gm
  modified_base 4: mod_base = OTHER; note = 2'-O-methyladenosine
  modified_base 5: mod_base = OTHER; note = 2'-O-methyladenosine
  modified_base 6: mod_base = OTHER; note = 2'-O-methyladenosine
  modified_base 7: mod_base = gm
  modified_base 8: mod_base = gm
  modified_base 9: mod_base = OTHER; note = 2'-fluorouridine
  modified_base 10: mod_base = OTHER; note = 2'-fluoroguanosine
  modified_base 11: mod_base = OTHER; note = 2'-fluorocytidine
  modified_base 12: mod_base = OTHER; note = 2'-O-methyladenosine
  modified_base 13: mod_base = OTHER; note = 2'-O-methyladenosine
  modified_base 14: mod_base = OTHER; note = 2'-O-methyladenosine
  modified_base 15: mod_base = OTHER; note = 2'-O-methyladenosine
  modified_base 16: mod_base = um
  modified_base 17: mod_base = um
  modified_base 18: mod_base = cm
  modified_base 19: mod_base = OTHER; note = 2'-O-methylcytidine with a 3'-phosphorothioate linkage
  modified_base 20: mod_base = OTHER; note = 2'-O-methyluridine with a 3'-phosphorothioate linkage
  modified_base 21: mod_base = OTHER; note = 2'-O-methyladenosine
gagaaaggtgcaaaattccta

SEQ ID NO: 1555 - RNA, 23 nt, synthetic construct
  source 1..23: mol_type = other RNA
  modified_base 1: mod_base = OTHER; note = 2'-O-methyluridine with a 3'-phosphorothioate linkage and a 5'-phosphate substitution
  modified_base 2: mod_base = OTHER; note = 2'-fluoroadenosine with a 3'-phosphorothioate linkage
  modified_base 3: mod_base = gm
  modified_base 4: mod_base = gm
  modified_base 5: mod_base = OTHER; note = 2'-fluoroadenosine
  modified_base 6: mod_base = OTHER; note = 2'-O-methyladenosine
  modified_base 7: mod_base = OTHER; note = 2'-fluorouridine
  modified_base 8: mod_base = um
  modified_base 9: mod_base = um
  modified_base 10: mod_base = um
  modified_base 11: mod_base = gm
  modified_base 12: mod_base = cm
  modified_base 13: mod_base = OTHER; note = 2'-O-methyladenosine
  modified_base 14: mod_base = OTHER; note = 2'-fluorocytidine
  modified_base 15: mod_base = cm
  modified_base 16: mod_base = OTHER; note = 2'-fluorouridine
  modified_base 17: mod_base = um
  modified_base 18: mod_base = um
  modified_base 19: mod_base = cm
  modified_base 20: mod_base = um
  modified_base 21: mod_base = OTHER; note = 2'-O-methylcytidine with a 3'-phosphorothioate linkage
  modified_base 22: mod_base = OTHER; note = 2'-O-methyluridine with a 3'-phosphorothioate linkage
  modified_base 23: mod_base = gm
taggaattttgcacctttctctg

SEQ ID NO: 1556 - RNA, 21 nt, synthetic construct
  source 1..21: mol_type = other RNA
  modified_base 1: mod_base = OTHER; note = 2'-O-methyladenosine with a 3'-phosphorothioate linkage
  modified_base 2: mod_base = OTHER; note = 2'-O-methylguanosine with a 3'-phosphorothioate linkage
  modified_base 3: mod_base = OTHER; note = 2'-O-methyladenosine
  modified_base 4: mod_base = OTHER; note = 2'-O-methyladenosine
  modified_base 5: mod_base = OTHER; note = 2'-O-methyladenosine
  modified_base 6: mod_base = gm
  modified_base 7: mod_base = gm
  modified_base 8: mod_base = um
  modified_base 9: mod_base = OTHER; note = 2'-fluoroguanosine
  modified_base 10: mod_base = OTHER; note = 2'-fluorocytidine
  modified_base 11: mod_base = OTHER; note = 2'-fluoroadenosine
  modified_base 12: mod_base = OTHER; note = 2'-O-methyladenosine
  modified_base 13: mod_base = OTHER; note = 2'-O-methyladenosine
  modified_base 14: mod_base = OTHER; note = 2'-O-methyladenosine
  modified_base 15: mod_base = um
  modified_base 16: mod_base = um
  modified_base 17: mod_base = cm
  modified_base 18: mod_base = cm
  modified_base 19: mod_base = OTHER; note = 2'-O-methyluridine with a 3'-phosphorothioate linkage
  modified_base 20: mod_base = OTHER; note = 2'-O-methyluridine with a 3'-phosphorothioate linkage
  modified_base 21: mod_base = OTHER; note = 2'-O-methyladenosine
agaaaggtgcaaaattcctta

SEQ ID NO: 1557 - RNA, 23 nt, synthetic construct
  source 1..23: mol_type = other RNA
  modified_base 1: mod_base = OTHER; note = 2'-O-methyluridine with a 3'-phosphorothioate linkage and a 5'-phosphate substitution
  modified_base 2: mod_base = OTHER; note = 2'-fluoroadenosine with a 3'-phosphorothioate linkage
  modified_base 3: mod_base = OTHER; note = 2'-O-methyladenosine
  modified_base 4: mod_base = gm
  modified_base 5: mod_base = OTHER; note = 2'-fluoroguanosine
  modified_base 6: mod_base = OTHER; note = 2'-O-methyladenosine
  modified_base 7: mod_base = OTHER; note = 2'-fluoroadenosine
  modified_base 8: mod_base = um
  modified_base 9: mod_base = um
  modified_base 10: mod_base = um
  modified_base 11: mod_base = um
  modified_base 12: mod_base = gm
  modified_base 13: mod_base = cm
  modified_base 14: mod_base = OTHER; note = 2'-fluoroadenosine
  modified_base 15: mod_base = cm
  modified_base 16: mod_base = OTHER; note = 2'-fluorocytidine
  modified_base 17: mod_base = um
  modified_base 18: mod_base = um
  modified_base 19: mod_base = um
  modified_base 20: mod_base = cm
  modified_base 21: mod_base = OTHER; note = 2'-O-methyluridine with a 3'-phosphorothioate linkage
  modified_base 22: mod_base = OTHER; note = 2'-O-methylcytidine with a 3'-phosphorothioate linkage
  modified_base 23: mod_base = um
taaggaattttgcacctttctct

SEQ ID NO: 1558 - RNA, 21 nt, synthetic construct
  source 1..21: mol_type = other RNA
  modified_base 1: mod_base = OTHER; note = 2'-O-methylguanosine with a 3'-phosphorothioate linkage
  modified_base 2: mod_base = OTHER; note = 2'-O-methyladenosine with a 3'-phosphorothioate linkage
  modified_base 3: mod_base = OTHER; note = 2'-O-methyladenosine
  modified_base 4: mod_base = OTHER; note = 2'-O-methyladenosine
  modified_base 5: mod_base = gm
  modified_base 6: mod_base = gm
  modified_base 7: mod_base = um
  modified_base 8: mod_base = gm
  modified_base 9: mod_base = OTHER; note = 2'-fluorocytidine
  modified_base 10: mod_base = OTHER; note = 2'-fluoroadenosine
  modified_base 11: mod_base = OTHER; note = 2'-fluoroadenosine
  modified_base 12: mod_base = OTHER; note = 2'-O-methyladenosine
  modified_base 13: mod_base = OTHER; note = 2'-O-methyladenosine
  modified_base 14: mod_base = um
  modified_base 15: mod_base = um
  modified_base 16: mod_base = cm
  modified_base 17: mod_base = cm
  modified_base 18: mod_base = um
  modified_base 19: mod_base = OTHER; note = 2'-O-methyluridine with a 3'-phosphorothioate linkage
  modified_base 20: mod_base = OTHER; note = 2'-O-methyladenosine with a 3'-phosphorothioate linkage
  modified_base 21: mod_base = OTHER; note = 2'-O-methyladenosine
gaaaggtgcaaaattccttaa

SEQ ID NO: 1559 - RNA, 23 nt, synthetic construct
  source 1..23: mol_type = other RNA
  modified_base 1: mod_base = OTHER; note = 2'-O-methyluridine with a 3'-phosphorothioate linkage and a 5'-phosphate substitution
  modified_base 2: mod_base = OTHER; note = 2'-fluorouridine with a 3'-phosphorothioate linkage
  modified_base 3: mod_base = OTHER; note = 2'-O-methyladenosine
  modified_base 4: mod_base = OTHER; note = 2'-O-methyladenosine
  modified_base 5: mod_base = OTHER; note = 2'-fluoroguanosine
  modified_base 6: mod_base = gm
  modified_base 7: mod_base = OTHER; note = 2'-fluoroadenosine
  modified_base 8: mod_base = OTHER; note = 2'-O-methyladenosine
  modified_base 9: mod_base = um
  modified_base 10: mod_base = um
  modified_base 11: mod_base = um
  modified_base 12: mod_base = um
  modified_base 13: mod_base = gm
  modified_base 14: mod_base = OTHER; note = 2'-fluorocytidine
  modified_base 15: mod_base = OTHER; note = 2'-O-methyladenosine
  modified_base 16: mod_base = OTHER; note = 2'-fluorocytidine
  modified_base 17: mod_base = cm
  modified_base 18: mod_base = um
  modified_base 19: mod_base = um
  modified_base 20: mod_base = um
  modified_base 21: mod_base = OTHER; note = 2'-O-methylcytidine with a 3'-phosphorothioate linkage
  modified_base 22: mod_base = OTHER; note = 2'-O-methyluridine with a 3'-phosphorothioate linkage
  modified_base 23: mod_base = cm
ttaaggaattttgcacctttctc

SEQ ID NO: 1560 - RNA, 21 nt, synthetic construct
  source 1..21: mol_type = other RNA
  modified_base 1: mod_base = OTHER; note = 2'-O-methyladenosine with a 3'-phosphorothioate linkage
  modified_base 2: mod_base = OTHER; note = 2'-O-methyladenosine with a 3'-phosphorothioate linkage
  modified_base 3: mod_base = OTHER; note = 2'-O-methyladenosine
  modified_base 4: mod_base = gm
  modified_base 5: mod_base = gm
  modified_base 6: mod_base = um
  modified_base 7: mod_base = gm
  modified_base 8: mod_base = cm
  modified_base 9: mod_base = OTHER; note = 2'-fluoroadenosine
  modified_base 10: mod_base = OTHER; note = 2'-fluoroadenosine
  modified_base 11: mod_base = OTHER; note = 2'-fluoroadenosine
  modified_base 12: mod_base = OTHER; note = 2'-O-methyladenosine
  modified_base 13: mod_base = um
  modified_base 14: mod_base = um
  modified_base 15: mod_base = cm
  modified_base 16: mod_base = cm
  modified_base 17: mod_base = um
  modified_base 18: mod_base = um
  modified_base 19: mod_base = OTHER; note = 2'-O-methyladenosine with a 3'-phosphorothioate linkage
  modified_base 20: mod_base = OTHER; note = 2'-O-methylguanosine with a 3'-phosphorothioate linkage
  modified_base 21: mod_base = OTHER; note = 2'-O-methyladenosine
aaaggtgcaaaattccttaga

SEQ ID NO: 1561 - RNA, 23 nt, synthetic construct
  source 1..23: mol_type = other RNA
  modified_base 1: mod_base = OTHER; note = 2'-O-methyluridine with a 3'-phosphorothioate linkage and a 5'-phosphate substitution
  modified_base 2: mod_base = OTHER; note = 2'-fluorocytidine with a 3'-phosphorothioate linkage
  modified_base 3: mod_base = um
  modified_base 4: mod_base = OTHER; note = 2'-O-methyladenosine
  modified_base 5: mod_base = OTHER; note = 2'-fluoroadenosine
  modified_base 6: mod_base = gm
  modified_base 7: mod_base = OTHER; note = 2'-fluoroguanosine
  modified_base 8: mod_base = OTHER; note = 2'-O-methyladenosine
  modified_base 9: mod_base = OTHER; note = 2'-O-methyladenosine
  modified_base 10: mod_base = um
  modified_base 11: mod_base = um
  modified_base 12: mod_base = um
  modified_base 13: mod_base = um
  modified_base 14: mod_base = OTHER; note = 2'-fluoroguanosine
  modified_base 15: mod_base = cm
  modified_base 16: mod_base = OTHER; note = 2'-fluoroadenosine
  modified_base 17: mod_base = cm
  modified_base 18: mod_base = cm
  modified_base 19: mod_base = um
  modified_base 20: mod_base = um
  modified_base 21: mod_base = OTHER; note = 2'-O-methyluridine with a 3'-phosphorothioate linkage
  modified_base 22: mod_base = OTHER; note = 2'-O-methylcytidine with a 3'-phosphorothioate linkage
  modified_base 23: mod_base = um
tctaaggaattttgcacctttct

SEQ ID NO: 1562 - RNA, 21 nt, synthetic construct
  source 1..21: mol_type = other RNA
  modified_base 1: mod_base = OTHER; note = 2'-O-methyladenosine with a 3'-phosphorothioate linkage
  modified_base 2: mod_base = OTHER; note = 2'-O-methyladenosine with a 3'-phosphorothioate linkage
  modified_base 3: mod_base = gm
  modified_base 4: mod_base = gm
  modified_base 5: mod_base = um
  modified_base 6: mod_base = gm
  modified_base 7: mod_base = cm
  modified_base 8: mod_base = OTHER; note = 2'-O-methyladenosine
  modified_base 9: mod_base = OTHER; note = 2'-fluoroadenosine
  modified_base 10: mod_base = OTHER; note = 2'-fluoroadenosine
  modified_base 11: mod_base = OTHER; note = 2'-fluoroadenosine
  modified_base 12: mod_base = um
  modified_base 13: mod_base = um
  modified_base 14: mod_base = cm
  modified_base 15: mod_base = cm
  modified_base 16: mod_base = um
  modified_base 17: mod_base = um
  modified_base 18: mod_base = OTHER; note = 2'-O-methyladenosine
  modified_base 19: mod_base = OTHER; note = 2'-O-methylguanosine with a 3'-phosphorothioate linkage
  modified_base 20: mod_base = OTHER; note = 2'-O-methyluridine with a 3'-phosphorothioate linkage
  modified_base 21: mod_base = OTHER; note = 2'-O-methyladenosine
aaggtgcaaaattccttagta

SEQ ID NO: 1563 - RNA, 23 nt, synthetic construct
  source 1..23: mol_type = other RNA
  modified_base 1: mod_base = OTHER; note = 2'-O-methyluridine with a 3'-phosphorothioate linkage and a 5'-phosphate substitution
  modified_base 2: mod_base = OTHER; note = 2'-fluoroadenosine with a 3'-phosphorothioate linkage
  modified_base 3: mod_base = cm
  modified_base 4: mod_base = um
  modified_base 5: mod_base = OTHER; note = 2'-fluoroadenosine
  modified_base 6: mod_base = OTHER; note = 2'-O-methyladenosine
  modified_base 7: mod_base = OTHER; note = 2'-fluoroguanosine
  modified_base 8: mod_base = gm
  modified_base 9: mod_base = OTHER; note = 2'-O-methyladenosine
  modified_base 10: mod_base = OTHER; note = 2'-O-methyladenosine
  modified_base 11: mod_base = um
  modified_base 12: mod_base = um
  modified_base 13: mod_base = um
  modified_base 14: mod_base = OTHER; note = 2'-fluorouridine
  modified_base 15: mod_base = gm
  modified_base 16: mod_base = OTHER; note = 2'-fluorocytidine
  modified_base 17: mod_base = OTHER; note = 2'-O-methyladenosine
  modified_base 18: mod_base = cm
  modified_base 19: mod_base = cm
  modified_base 20: mod_base = um
  modified_base 21: mod_base = OTHER; note = 2'-O-methyluridine with a 3'-phosphorothioate linkage
  modified_base 22: mod_base = OTHER; note = 2'-O-methyluridine with a 3'-phosphorothioate linkage
  modified_base 23: mod_base = cm
tactaaggaattttgcacctttc

SEQ ID NO: 1564 - RNA, 21 nt, synthetic construct
  source 1..21: mol_type = other RNA
  modified_base 1: mod_base = OTHER; note = 2'-O-methyladenosine with a 3'-phosphorothioate linkage
  modified_base 2: mod_base = OTHER; note = 2'-O-methylguanosine with a 3'-phosphorothioate linkage
  modified_base 3: mod_base = gm
  modified_base 4: mod_base = um
  modified_base 5: mod_base = gm
  modified_base 6: mod_base = cm
  modified_base 7: mod_base = OTHER; note = 2'-O-methyladenosine
  modified_base 8: mod_base = OTHER; note = 2'-O-methyladenosine
  modified_base 9: mod_base = OTHER; note = 2'-fluoroadenosine
  modified_base 10: mod_base = OTHER; note = 2'-fluoroadenosine
  modified_base 11: mod_base = OTHER; note = 2'-fluorouridine
  modified_base 12: mod_base = um
  modified_base 13: mod_base = cm
  modified_base 14: mod_base = cm
  modified_base 15: mod_base = um
  modified_base 16: mod_base = um
  modified_base 17: mod_base = OTHER; note = 2'-O-methyladenosine
  modified_base 18: mod_base = gm
  modified_base 19: mod_base = OTHER; note = 2'-O-methyluridine with a 3'-phosphorothioate linkage
  modified_base 20: mod_base = OTHER; note = 2'-O-methylguanosine with a 3'-phosphorothioate linkage
  modified_base 21: mod_base = OTHER; note = 2'-O-methyladenosine
aggtgcaaaattccttagtga

SEQ ID NO: 1565 - RNA, 23 nt, synthetic construct
  source 1..23: mol_type = other RNA
  modified_base 1: mod_base = OTHER; note = 2'-O-methyluridine with a 3'-phosphorothioate linkage and a 5'-phosphate substitution
  modified_base 2: mod_base = OTHER; note = 2'-fluorocytidine with a 3'-phosphorothioate linkage
  modified_base 3: mod_base = OTHER; note = 2'-O-methyladenosine
  modified_base 4: mod_base = cm
  modified_base 5: mod_base = OTHER; note = 2'-fluorouridine
  modified_base 6: mod_base = OTHER; note = 2'-O-methyladenosine
  modified_base 7: mod_base = OTHER; note = 2'-fluoroadenosine
  modified_base 8: mod_base = gm
  modified_base 9: mod_base = gm
  modified_base 10: mod_base = OTHER; note = 2'-O-methyladenosine
  modified_base 11: mod_base = OTHER; note = 2'-O-methyladenosine
  modified_base 12: mod_base = um
  modified_base 13: mod_base = um
  modified_base 14: mod_base = OTHER; note = 2'-fluorouridine
  modified_base 15: mod_base = um
  modified_base 16: mod_base = OTHER; note = 2'-fluoroguanosine
  modified_base 17: mod_base = cm
  modified_base 18: mod_base = OTHER; note = 2'-O-methyladenosine
  modified_base 19: mod_base = cm
  modified_base 20: mod_base = cm
  modified_base 21: mod_base = OTHER; note = 2'-O-methyluridine with a 3'-phosphorothioate linkage
  modified_base 22: mod_base = OTHER; note = 2'-O-methyluridine with a 3'-phosphorothioate linkage
  modified_base 23: mod_base = um
tcactaaggaattttgcaccttt

SEQ ID NO: 1566 - RNA, 21 nt, synthetic construct
  source 1..21: mol_type = other RNA
  modified_base 1: mod_base = OTHER; note = 2'-O-methyluridine with a 3'-phosphorothioate linkage
  modified_base 2: mod_base = OTHER; note = 2'-O-methylguanosine with a 3'-phosphorothioate linkage
  modified_base 3: mod_base = cm
  modified_base 4: mod_base = OTHER; note = 2'-O-methyladenosine
  modified_base 5: mod_base = OTHER; note = 2'-O-methyladenosine
  modified_base 6: mod_base = OTHER; note = 2'-O-methyladenosine
  modified_base 7: mod_base = OTHER; note = 2'-O-methyladenosine
  modified_base 8: mod_base = um
  modified_base 9: mod_base = OTHER; note = 2'-fluorouridine
  modified_base 10: mod_base = OTHER; note = 2'-fluorocytidine
  modified_base 11: mod_base = OTHER; note = 2'-fluorocytidine
  modified_base 12: mod_base = um
  modified_base 13: mod_base = um
  modified_base 14: mod_base = OTHER; note = 2'-O-methyladenosine
  modified_base 15: mod_base = gm
  modified_base 16: mod_base = um
  modified_base 17: mod_base = gm
  modified_base 18: mod_base = OTHER; note = 2'-O-methyladenosine
  modified_base 19: mod_base = OTHER; note = 2'-O-methyluridine with a 3'-phosphorothioate linkage
  modified_base 20: mod_base = OTHER; note = 2'-O-methylguanosine with a 3'-phosphorothioate linkage
  modified_base 21: mod_base = OTHER; note = 2'-O-methyladenosine
tgcaaaattccttagtgatga

SEQ ID NO: 1567 - RNA, 23 nt, synthetic construct
  source 1..23: mol_type = other RNA
  modified_base 1: mod_base = OTHER; note = 2'-O-methyluridine with a 3'-phosphorothioate linkage and a 5'-phosphate substitution
  modified_base 2: mod_base = OTHER; note = 2'-fluorocytidine with a 3'-phosphorothioate linkage
  modified_base 3: mod_base = OTHER; note = 2'-O-methyladenosine
  modified_base 4: mod_base = um
  modified_base 5: mod_base = OTHER; note = 2'-fluorocytidine
  modified_base 6: mod_base = OTHER; note = 2'-O-methyladenosine
  modified_base 7: mod_base = OTHER; note = 2'-fluorocytidine
  modified_base 8: mod_base = um
  modified_base 9: mod_base = OTHER; note = 2'-O-methyladenosine
  modified_base 10: mod_base = OTHER; note = 2'-O-methyladenosine
  modified_base 11: mod_base = gm
  modified_base 12: mod_base = gm
  modified_base 13: mod_base = OTHER; note = 2'-O-methyladenosine
  modified_base 14: mod_base = OTHER; note = 2'-fluoroadenosine
  modified_base 15: mod_base = um
  modified_base 16: mod_base = OTHER; note = 2'-fluorouridine
  modified_base 17: mod_base = um
  modified_base 18: mod_base = um
  modified_base 19: mod_base = gm
  modified_base 20: mod_base = cm
  modified_base 21: mod_base = OTHER; note = 2'-O-methyladenosine with a 3'-phosphorothioate linkage
  modified_base 22: mod_base = OTHER; note = 2'-O-methylcytidine with a 3'-phosphorothioate linkage
  modified_base 23: mod_base = cm
tcatcactaaggaattttgcacc

SEQ ID NO: 1568 - RNA, 21 nt, synthetic construct
  source 1..21: mol_type = other RNA
  modified_base 1: mod_base = OTHER; note = 2'-O-methylguanosine with a 3'-phosphorothioate linkage
  modified_base 2: mod_base = OTHER; note = 2'-O-methylcytidine with a 3'-phosphorothioate linkage
  modified_base 3: mod_base = OTHER; note = 2'-O-methyladenosine
  modified_base 4: mod_base = OTHER; note = 2'-O-methyladenosine
  modified_base 5: mod_base = OTHER; note = 2'-O-methyladenosine
  modified_base 6: mod_base = OTHER; note = 2'-O-methyladenosine
  modified_base 7: mod_base = um
  modified_base 8: mod_base = um
  modified_base 9: mod_base = OTHER; note = 2'-fluorocytidine
  modified_base 10: mod_base = OTHER; note = 2'-fluorocytidine
  modified_base 11: mod_base = OTHER; note = 2'-fluorouridine
  modified_base 12: mod_base = um
  modified_base 13: mod_base = OTHER; note = 2'-O-methyladenosine
  modified_base 14: mod_base = gm
  modified_base 15: mod_base = um
  modified_base 16: mod_base = gm
  modified_base 17: mod_base = OTHER; note = 2'-O-methyladenosine
  modified_base 18: mod_base = um
  modified_base 19: mod_base = OTHER; note = 2'-O-methylguanosine with a 3'-phosphorothioate linkage
  modified_base 20: mod_base = OTHER; note = 2'-O-methylcytidine with a 3'-phosphorothioate linkage
  modified_base 21: mod_base = OTHER; note = 2'-O-methyladenosine
gcaaaattccttagtgatgca

SEQ ID NO: 1569 - RNA, 23 nt, synthetic construct
  source 1..23: mol_type = other RNA
  modified_base 1: mod_base = OTHER; note = 2'-O-methyluridine with a 3'-phosphorothioate linkage and a 5'-phosphate substitution
  modified_base 2: mod_base = OTHER; note = 2'-fluoroguanosine with a 3'-phosphorothioate linkage
  modified_base 3: mod_base = cm
  modified_base 4: mod_base = OTHER; note = 2'-O-methyladenosine
  modified_base 5: mod_base = OTHER; note = 2'-fluorouridine
  modified_base 6: mod_base = cm
  modified_base 7: mod_base = OTHER; note = 2'-fluoroadenosine
  modified_base 8: mod_base = cm
  modified_base 9: mod_base = um
  modified_base 10: mod_base = OTHER; note = 2'-O-methyladenosine
  modified_base 11: mod_base = OTHER; note = 2'-O-methyladenosine
  modified_base 12: mod_base = gm
  modified_base 13: mod_base = gm
  modified_base 14: mod_base = OTHER; note = 2'-fluoroadenosine
  modified_base 15: mod_base = OTHER; note = 2'-O-methyladenosine
  modified_base 16: mod_base = OTHER; note = 2'-fluorouridine
  modified_base 17: mod_base = um
  modified_base 18: mod_base = um
  modified_base 19: mod_base = um
  modified_base 20: mod_base = gm
  modified_base 21: mod_base = OTHER; note = 2'-O-methylcytidine with a 3'-phosphorothioate linkage
  modified_base 22: mod_base = OTHER; note = 2'-O-methyladenosine with a 3'-phosphorothioate linkage
  modified_base 23: mod_base = cm
tgcatcactaaggaattttgcac

SEQ ID NO: 1570 - RNA, 21 nt, synthetic construct
  source 1..21: mol_type = other RNA
  modified_base 1: mod_base = OTHER; note = 2'-O-methyladenosine with a 3'-phosphorothioate linkage
  modified_base 2: mod_base = OTHER; note = 2'-O-methyladenosine with a 3'-phosphorothioate linkage
  modified_base 3: mod_base = um
  modified_base 4: mod_base = um
  modified_base 5: mod_base = cm
  modified_base 6: mod_base = cm
  modified_base 7: mod_base = um
  modified_base 8: mod_base = um
  modified_base 9: mod_base = OTHER; note = 2'-fluoroadenosine
  modified_base 10: mod_base = OTHER; note = 2'-fluoroguanosine
  modified_base 11: mod_base = OTHER; note = 2'-fluorouridine
  modified_base 12: mod_base = gm
  modified_base 13: mod_base = OTHER; note = 2'-O-methyladenosine
  modified_base 14: mod_base = um
  modified_base 15: mod_base = gm
  modified_base 16: mod_base = cm
  modified_base 17: mod_base = um
  modified_base 18: mod_base = gm
  modified_base 19: mod_base = OTHER; note = 2'-O-methyladenosine with a 3'-phosphorothioate linkage
  modified_base 20: mod_base = OTHER; note = 2'-O-methylguanosine with a 3'-phosphorothioate linkage
  modified_base 21: mod_base = OTHER; note = 2'-O-methyladenosine
aattccttagtgatgctgaga

SEQ ID NO: 1571 - RNA, 23 nt, synthetic construct
  source 1..23: mol_type = other RNA
  modified_base 1: mod_base = OTHER; note = 2'-O-methyluridine with a 3'-phosphorothioate linkage and a 5'-phosphate substitution
  modified_base 2: mod_base = OTHER; note = 2'-fluorocytidine with a 3'-phosphorothioate linkage
  modified_base 3: mod_base = um
  modified_base 4: mod_base = cm
  modified_base 5: mod_base = OTHER; note = 2'-fluoroadenosine
  modified_base 6: mod_base = gm
  modified_base 7: mod_base = OTHER; note = 2'-fluorocytidine
  modified_base 8: mod_base = OTHER; note = 2'-O-methyladenosine
  modified_base 9: mod_base = um
  modified_base 10: mod_base = cm
  modified_base 11: mod_base = OTHER; note = 2'-O-methyladenosine
  modified_base 12: mod_base = cm
  modified_base 13: mod_base = um
  modified_base 14: mod_base = OTHER; note = 2'-fluoroadenosine
  modified_base 15: mod_base = OTHER; note = 2'-O-methyladenosine
  modified_base 16: mod_base = OTHER; note = 2'-fluoroguanosine
  modified_base 17: mod_base = gm
  modified_base 18: mod_base = OTHER; note = 2'-O-methyladenosine
  modified_base 19: mod_base = OTHER; note = 2'-O-methyladenosine
  modified_base 20: mod_base = um
  modified_base 21: mod_base = OTHER; note = 2'-O-methyluridine with a 3'-phosphorothioate linkage
  modified_base 22: mod_base = OTHER; note = 2'-O-methyluridine with a 3'-phosphorothioate linkage
  modified_base 23: mod_base = um
tctcagcatcactaaggaatttt

SEQ ID NO: 1572 - RNA, 21 nt, synthetic construct
  source 1..21: mol_type = other RNA
  modified_base 1: mod_base = OTHER; note = 2'-O-methyluridine with a 3'-phosphorothioate linkage
  modified_base 2: mod_base = OTHER; note = 2'-O-methylcytidine with a 3'-phosphorothioate linkage
  modified_base 3: mod_base = cm
  modified_base 4: mod_base = um
  modified_base 5: mod_base = um
  modified_base 6: mod_base = OTHER; note = 2'-O-methyladenosine
  modified_base 7: mod_base = gm
  modified_base 8: mod_base = um
  modified_base 9: mod_base = OTHER; note = 2'-fluoroguanosine
  modified_base 10: mod_base = OTHER; note = 2'-fluoroadenosine
  modified_base 11: mod_base = OTHER; note = 2'-fluorouridine
  modified_base 12: mod_base = gm
  modified_base 13: mod_base = cm
  modified_base 14: mod_base = um
  modified_base 15: mod_base = gm
  modified_base 16: mod_base = OTHER; note = 2'-O-methyladenosine
  modified_base 17: mod_base = gm
  modified_base 18: mod_base = OTHER; note = 2'-O-methyladenosine
  modified_base 19: mod_base = OTHER; note = 2'-O-methyluridine with a 3'-phosphorothioate linkage
  modified_base 20: mod_base = OTHER; note = 2'-O-methylcytidine with a 3'-phosphorothioate linkage
  modified_base 21: mod_base = OTHER; note = 2'-O-methyladenosine
tccttagtgatgctgagatca

SEQ ID NO: 1573 - RNA, 23 nt, synthetic construct
  source 1..23: mol_type = other RNA
  modified_base 1: mod_base = OTHER; note = 2'-O-methyluridine with a 3'-phosphorothioate linkage and a 5'-phosphate substitution
  modified_base 2: mod_base = OTHER; note = 2'-fluoroguanosine with a 3'-phosphorothioate linkage
  modified_base 3: mod_base = OTHER; note = 2'-O-methyladenosine
  modified_base 4: mod_base = um
  modified_base 5: mod_base = OTHER; note = 2'-fluorocytidine
  modified_base 6: mod_base = um
  modified_base 7: mod_base = OTHER; note = 2'-fluorocytidine
  modified_base 8: mod_base = OTHER; note = 2'-O-methyladenosine
  modified_base 9: mod_base = gm
  modified_base 10: mod_base = cm
  modified_base 11: mod_base = OTHER; note = 2'-O-methyladenosine
  modified_base 12: mod_base = um
  modified_base 13: mod_base = cm
  modified_base 14: mod_base = OTHER; note = 2'-fluoroadenosine
  modified_base 15: mod_base = cm
  modified_base 16: mod_base = OTHER; note = 2'-fluorouridine
  modified_base 17: mod_base = OTHER; note = 2'-O-methyladenosine
  modified_base 18: mod_base = OTHER; note = 2'-O-methyladenosine
  modified_base 19: mod_base = gm
  modified_base 20: mod_base = gm
  modified_base 21: mod_base = OTHER; note = 2'-O-methyladenosine with a 3'-phosphorothioate linkage
  modified_base 22: mod_base = OTHER; note = 2'-O-methyladenosine with a 3'-phosphorothioate linkage
  modified_base 23: mod_base = um
tgatctcagcatcactaaggaat

SEQ ID NO: 1574 - RNA, 21 nt, synthetic construct
  source 1..21: mol_type = other RNA
  modified_base 1: mod_base = OTHER; note = 2'-O-methylcytidine with a 3'-phosphorothioate linkage
  modified_base 2: mod_base = OTHER; note = 2'-O-methylcytidine with a 3'-phosphorothioate linkage
  modified_base 3: mod_base = um
  modified_base 4: mod_base = um
  modified_base 5: mod_base = OTHER; note = 2'-O-methyladenosine
  modified_base 6: mod_base = gm
  modified_base 7: mod_base = um
  modified_base 8: mod_base = gm
  modified_base 9: mod_base = OTHER; note = 2'-fluoroadenosine
  modified_base 10: mod_base = OTHER; note = 2'-fluorouridine
  modified_base 11: mod_base = OTHER; note = 2'-fluoroguanosine
  modified_base 12: mod_base = cm
  modified_base 13: mod_base = um
  modified_base 14: mod_base = gm
  modified_base 15: mod_base = OTHER; note = 2'-O-methyladenosine
  modified_base 16: mod_base = gm
  modified_base 17: mod_base = OTHER; note = 2'-O-methyladenosine
  modified_base 18: mod_base = um
  modified_base 19: mod_base = OTHER; note = 2'-O-methylcytidine with a 3'-phosphorothioate linkage
  modified_base 20: mod_base = OTHER; note = 2'-O-methyladenosine with a 3'-phosphorothioate linkage
  modified_base 21: mod_base = OTHER; note = 2'-O-methyladenosine
ccttagtgatgctgagatcaa

SEQ ID NO: 1575 - RNA, 23 nt, synthetic construct
  source 1..23: mol_type = other RNA
  modified_base 1: mod_base = OTHER; note = 2'-O-methyluridine with a 3'-phosphorothioate linkage and a 5'-phosphate substitution
  modified_base 2: mod_base = OTHER; note = 2'-fluorouridine with a 3'-phosphorothioate linkage
  modified_base 3: mod_base = gm
  modified_base 4: mod_base = OTHER; note = 2'-O-methyladenosine
  modified_base 5: mod_base = OTHER; note = 2'-fluorouridine
  modified_base 6: mod_base = cm
  modified_base 7: mod_base = OTHER; note = 2'-fluorouridine
  modified_base 8: mod_base = cm
  modified_base 9: mod_base = OTHER; note = 2'-O-methyladenosine
  modified_base 10: mod_base = gm
  modified_base 11: mod_base = cm
  modified_base 12: mod_base = OTHER; note = 2'-O-methyladenosine
  modified_base 13: mod_base = um
  modified_base 14: mod_base = OTHER; note = 2'-fluorocytidine
  modified_base 15: mod_base = OTHER; note = 2'-O-methyladenosine
  modified_base 16: mod_base = OTHER; note = 2'-fluorocytidine
  modified_base 17: mod_base = um
  modified_base 18: mod_base = OTHER; note = 2'-O-methyladenosine
  modified_base 19: mod_base = OTHER; note = 2'-O-methyladenosine
  modified_base 20: mod_base = gm
  modified_base 21: mod_base = OTHER; note = 2'-O-methylguanosine with a 3'-phosphorothioate linkage
  modified_base 22: mod_base = OTHER; note = 2'-O-methyladenosine with a 3'-phosphorothioate linkage
  modified_base 23: mod_base = OTHER; note = 2'-O-methyladenosine
ttgatctcagcatcactaaggaa

SEQ ID NO: 1576 - RNA, 21 nt, synthetic construct
  source 1..21: mol_type = other RNA
  modified_base 1: mod_base = OTHER; note = 2'-O-methylcytidine with a 3'-phosphorothioate linkage
  modified_base 2: mod_base = OTHER; note = 2'-O-methyluridine with a 3'-phosphorothioate linkage
  modified_base 3: mod_base = gm
  modified_base 4: mod_base = OTHER; note = 2'-O-methyladenosine
  modified_base 5: mod_base = gm
  modified_base 6: mod_base = OTHER; note = 2'-O-methyladenosine
  modified_base 7: mod_base = um
  modified_base 8: mod_base = cm
  modified_base 9: mod_base = OTHER; note = 2'-fluoroadenosine
  modified_base 10: mod_base = OTHER; note = 2'-fluorouridine
  modified_base 11: mod_base = OTHER; note = 2'-fluorocytidine
  modified_base 12: mod_base = cm
  modified_base 13: mod_base = OTHER; note = 2'-O-methyladenosine
  modified_base 14: mod_base = gm
  modified_base 15: mod_base = um
  modified_base 16: mod_base = um
  modified_base 17: mod_base = OTHER; note = 2'-O-methyladenosine
  modified_base 18: mod_base = gm
  modified_base 19: mod_base = OTHER; note = 2'-O-methyluridine with a 3'-phosphorothioate linkage
  modified_base 20: mod_base = OTHER; note = 2'-O-methylcytidine with a 3'-phosphorothioate linkage
  modified_base 21: mod_base = OTHER; note = 2'-O-methyladenosine
ctgagatcatccagttagtca

SEQ ID NO: 1577 - RNA, 23 nt, synthetic construct
  source 1..23: mol_type = other RNA
  modified_base 1: mod_base = OTHER; note = 2'-O-methyluridine with a 3'-phosphorothioate linkage and a 5'-phosphate substitution
  modified_base 2: mod_base = OTHER; note = 2'-fluoroguanosine with a 3'-phosphorothioate linkage
  modified_base 3: mod_base = OTHER; note = 2'-O-methyladenosine
  modified_base 4: mod_base = cm
  modified_base 5: mod_base = OTHER; note = 2'-fluorouridine
  modified_base 6: mod_base = OTHER; note = 2'-O-methyladenosine
  modified_base 7: mod_base = OTHER; note = 2'-fluoroadenosine
  modified_base 8: mod_base = cm
  modified_base 9: mod_base = um
  modified_base 10: mod_base = gm
  modified_base 11: mod_base = gm
  modified_base 12: mod_base = OTHER; note = 2'-O-methyladenosine
  modified_base 13: mod_base = um
  modified_base 14: mod_base = OTHER; note = 2'-fluoroguanosine
  modified_base 15: mod_base = OTHER; note = 2'-O-methyladenosine
  modified_base 16: mod_base = OTHER; note = 2'-fluorouridine
  modified_base 17: mod_base = cm
  modified_base 18: mod_base = um
  modified_base 19: mod_base = cm
  modified_base 20: mod_base = OTHER; note = 2'-O-methyladenosine
  modified_base 21: mod_base = OTHER; note = 2'-O-methylguanosine with a 3'-phosphorothioate linkage
  modified_base 22: mod_base = OTHER; note = 2'-O-methylcytidine with a 3'-phosphorothioate linkage
  modified_base 23: mod_base = OTHER; note = 2'-O-methyladenosine
tgactaactggatgatctcagca

SEQ ID NO: 1578 - RNA, 21 nt, synthetic construct
  source 1..21: mol_type = other RNA
  modified_base 1: mod_base = OTHER; note = 2'-O-methyluridine with a 3'-phosphorothioate linkage
  modified_base 2: mod_base = OTHER; note = 2'-O-methylguanosine with a 3'-phosphorothioate linkage
  modified_base 3: mod_base = OTHER; note = 2'-O-methyladenosine
  modified_base 4: mod_base = gm
  modified_base 5: mod_base = OTHER; note = 2'-O-methyladenosine
  modified_base 6: mod_base = um
  modified_base 7: mod_base = cm
  modified_base 8: mod_base = OTHER; note = 2'-O-methyladenosine
  modified_base 9: mod_base = OTHER; note = 2'-fluorouridine
  modified_base 10: mod_base = OTHER; note = 2'-fluorocytidine
  modified_base 11: mod_base = OTHER; note = 2'-fluorocytidine
  modified_base 12: mod_base = OTHER; note = 2'-O-methyladenosine
  modified_base 13: mod_base = gm
  modified_base 14: mod_base = um
  modified_base 15: mod_base = um
  modified_base 16: mod_base = OTHER; note = 2'-O-methyladenosine
  modified_base 17: mod_base = gm
  modified_base 18: mod_base = um
  modified_base 19: mod_base = OTHER; note = 2'-O-methylcytidine with a 3'-phosphorothioate linkage
  modified_base 20: mod_base = OTHER; note = 2'-O-methyladenosine with a 3'-phosphorothioate linkage
  modified_base 21: mod_base = OTHER; note = 2'-O-methyladenosine
tgagatcatccagttagtcaa

SEQ ID NO: 1579 - RNA, 23 nt, synthetic construct
  source 1..23: mol_type = other RNA
  modified_base 1: mod_base = OTHER; note = 2'-O-methyluridine with a 3'-phosphorothioate linkage and a 5'-phosphate substitution
  modified_base 2: mod_base = OTHER; note = 2'-fluorouridine with a 3'-phosphorothioate linkage
  modified_base 3: mod_base = gm
  modified_base 4: mod_base = OTHER; note = 2'-O-methyladenosine
  modified_base 5: mod_base = OTHER; note = 2'-fluorocytidine
  modified_base 6: mod_base = um
  modified_base 7: mod_base = OTHER; note = 2'-fluoroadenosine
  modified_base 8: mod_base = OTHER; note = 2'-O-methyladenosine
  modified_base 9: mod_base = cm
  modified_base 10: mod_base = um
  modified_base 11: mod_base = gm
  modified_base 12: mod_base = gm
  modified_base 13: mod_base = OTHER; note = 2'-O-methyladenosine
  modified_base 14: mod_base = OTHER; note = 2'-fluorouridine
  modified_base 15: mod_base = gm
  modified_base 16: mod_base = OTHER; note = 2'-fluoroadenosine
  modified_base 17: mod_base = um
  modified_base 18: mod_base = cm
  modified_base 19: mod_base = um
  modified_base 20: mod_base = cm
  modified_base 21: mod_base = OTHER; note = 2'-O-methyladenosine with a 3'-phosphorothioate linkage
  modified_base 22: mod_base = OTHER; note = 2'-O-methylguanosine with a 3'-phosphorothioate linkage
  modified_base 23: mod_base = cm
ttgactaactggatgatctcagc

SEQ ID NO: 1580 - RNA, 21 nt, synthetic construct
  source 1..21: mol_type = other RNA
  modified_base 1: mod_base = OTHER; note = 2'-O-methylguanosine with a 3'-phosphorothioate linkage
  modified_base 2: mod_base = OTHER; note = 2'-O-methyladenosine with a 3'-phosphorothioate linkage
  modified_base 3: mod_base = gm
  modified_base 4: mod_base = OTHER; note = 2'-O-methyladenosine
  modified_base 5: mod_base = um
  modified_base 6: mod_base = cm
  modified_base 7: mod_base = OTHER; note = 2'-O-methyladenosine
  modified_base 8: mod_base = um
  modified_base 9: mod_base = OTHER; note = 2'-fluorocytidine
  modified_base 10: mod_base = OTHER; note = 2'-fluorocytidine
  modified_base 11: mod_base = OTHER; note = 2'-fluoroadenosine
  modified_base 12: mod_base = gm
  modified_base 13: mod_base = um
  modified_base 14: mod_base = um
  modified_base 15: mod_base = OTHER; note = 2'-O-methyladenosine
  modified_base 16: mod_base = gm
  modified_base 17: mod_base = um
  modified_base 18: mod_base = cm
  modified_base 19: mod_base = OTHER; note = 2'-O-methyladenosine with a 3'-phosphorothioate linkage
  modified_base 20: mod_base = OTHER; note = 2'-O-methyladenosine with a 3'-phosphorothioate linkage
  modified_base 21: mod_base = OTHER; note = 2'-O-methyladenosine
gagatcatccagttagtcaaa

SEQ ID NO: 1581 - RNA, 23 nt, synthetic construct
  source 1..23: mol_type = other RNA
  modified_base 1: mod_base = OTHER; note = 2'-O-methyluridine with a 3'-phosphorothioate linkage and a 5'-phosphate substitution
  modified_base 2: mod_base = OTHER; note = 2'-fluorouridine with a 3'-phosphorothioate linkage
  modified_base 3: mod_base = um
  modified_base 4: mod_base = gm
  modified_base 5: mod_base = OTHER; note = 2'-fluoroadenosine
  modified_base 6: mod_base = cm
  modified_base 7: mod_base = OTHER; note = 2'-fluorouridine
  modified_base 8: mod_base = OTHER; note = 2'-O-methyladenosine
  modified_base 9: mod_base = OTHER; note = 2'-O-methyladenosine
  modified_base 10: mod_base = cm
  modified_base 11: mod_base = um
  modified_base 12: mod_base = gm
  modified_base 13: mod_base = gm
  modified_base 14: mod_base = OTHER; note = 2'-fluoroadenosine
  modified_base 15: mod_base = um
  modified_base 16: mod_base = OTHER; note = 2'-fluoroguanosine
  modified_base 17: mod_base = OTHER; note = 2'-O-methyladenosine
  modified_base 18: mod_base = um
  modified_base 19: mod_base = cm
  modified_base 20: mod_base = um
  modified_base 21: mod_base = OTHER; note = 2'-O-methylcytidine with a 3'-phosphorothioate linkage
  modified_base 22: mod_base = OTHER; note = 2'-O-methyladenosine with a 3'-phosphorothioate linkage
  modified_base 23: mod_base = gm
tttgactaactggatgatctcag

SEQ ID NO: 1582 - RNA, 21 nt, synthetic construct
  source 1..21: mol_type = other RNA
  modified_base 1: mod_base = OTHER; note = 2'-O-methyladenosine with a 3'-phosphorothioate linkage
  modified_base 2: mod_base = OTHER; note = 2'-O-methyluridine with a 3'-phosphorothioate linkage
  modified_base 3: mod_base = cm
  modified_base 4: mod_base = OTHER; note = 2'-O-methyladenosine
  modified_base 5: mod_base = um
  modified_base 6: mod_base = cm
  modified_base 7: mod_base = cm
  modified_base 8: mod_base = OTHER; note = 2'-O-methyladenosine
  modified_base 9: mod_base = OTHER; note = 2'-fluoroguanosine
  modified_base 10: mod_base = OTHER; note = 2'-fluorouridine
  modified_base 11: mod_base = OTHER; note = 2'-fluorouridine
  modified_base 12: mod_base = OTHER; note = 2'-O-methyladenosine
  modified_base 13: mod_base = gm
  modified_base 14: mod_base = um
  modified_base 15: mod_base = cm
  modified_base 16: mod_base = OTHER; note = 2'-O-methyladenosine
  modified_base 17: mod_base = OTHER; note = 2'-O-methyladenosine
  modified_base 18: mod_base = um
  modified_base 19: mod_base = OTHER; note = 2'-O-methylguanosine with a 3'-phosphorothioate linkage
  modified_base 20: mod_base = OTHER; note = 2'-O-methylcytidine with a 3'-phosphorothioate linkage
  modified_base 21: mod_base = OTHER; note = 2'-O-methyladenosine
atcatccagttagtcaatgca

SEQ ID NO: 1583 - RNA, 23 nt, synthetic construct
  source 1..23: mol_type = other RNA
  modified_base 1: mod_base = OTHER; note = 2'-O-methyluridine with a 3'-phosphorothioate linkage and a 5'-phosphate substitution
  modified_base 2: mod_base = OTHER; note = 2'-fluoroguanosine with a 3'-phosphorothioate linkage
  modified_base 3: mod_base = cm
  modified_base 4: mod_base = OTHER; note = 2'-O-methyladenosine
  modified_base 5: mod_base = OTHER; note = 2'-fluorouridine
  modified_base 6: mod_base = um
  modified_base 7: mod_base = OTHER; note = 2'-fluoroguanosine
  modified_base 8: mod_base = OTHER; note = 2'-O-methyladenosine
  modified_base 9: mod_base = cm
  modified_base 10: mod_base = um
  modified_base 11: mod_base = OTHER; note = 2'-O-methyladenosine
  modified_base 12: mod_base = OTHER; note = 2'-O-methyladenosine
  modified_base 13: mod_base = cm
  modified_base 14: mod_base = OTHER; note = 2'-fluorouridine
  modified_base 15: mod_base = gm
  modified_base 16: mod_base = OTHER; note = 2'-fluoroguanosine
  modified_base 17: mod_base = OTHER; note = 2'-O-methyladenosine
  modified_base 18: mod_base = um
  modified_base 19: mod_base = gm
  modified_base 20: mod_base = OTHER; note = 2'-O-methyladenosine
  modified_base 21: mod_base = OTHER; note = 2'-O-methyluridine with a 3'-phosphorothioate linkage
  modified_base 22: mod_base = OTHER; note = 2'-O-methylcytidine with a 3'-phosphorothioate linkage
  modified_base 23: mod_base = um
tgcattgactaactggatgatct

SEQ ID NO: 1584 - RNA, 21 nt, synthetic construct
  source 1..21: mol_type = other RNA
  modified_base 1: mod_base = OTHER; note = 2'-O-methylguanosine with a 3'-phosphorothioate linkage
  modified_base 2: mod_base = OTHER; note = 2'-O-methyluridine with a 3'-phosphorothioate linkage
  modified_base 3: mod_base = cm
  modified_base 4: mod_base = OTHER; note = 2'-O-methyladenosine
  modified_base 5: mod_base = OTHER; note = 2'-O-methyladenosine
  modified_base 6: mod_base = um
  modified_base 7: mod_base = gm
  modified_base 8: mod_base = cm
  modified_base 9: mod_base = OTHER; note = 2'-fluorouridine
  modified_base 10: mod_base = OTHER; note = 2'-fluoroadenosine
  modified_base 11: mod_base = OTHER; note = 2'-fluoroadenosine
  modified_base 12: mod_base = gm
  modified_base 13: mod_base = cm
  modified_base 14: mod_base = OTHER; note = 2'-O-methyladenosine
  modified_base 15: mod_base = um
  modified_base 16: mod_base = OTHER; note = 2'-O-methyladenosine
  modified_base 17: mod_base = um
  modified_base 18: mod_base = cm
  modified_base 19: mod_base = OTHER; note = 2'-O-methylcytidine with a 3'-phosphorothioate linkage
  modified_base 20: mod_base = OTHER; note = 2'-O-methylcytidine with a 3'-phosphorothioate linkage
  modified_base 21: mod_base = OTHER; note = 2'-O-methyladenosine
gtcaatgctaagcatatccca

SEQ ID NO: 1585 - RNA, 23 nt, synthetic construct
  source 1..23: mol_type = other RNA
  modified_base 1: mod_base = OTHER; note = 2'-O-methyluridine with a 3'-phosphorothioate linkage and a 5'-phosphate substitution
  modified_base 2: mod_base = OTHER; note = 2'-fluoroguanosine with a 3'-phosphorothioate linkage
  modified_base 3: mod_base = gm
  modified_base 4: mod_base = gm
  modified_base 5: mod_base = OTHER; note = 2'-fluoroadenosine
  modified_base 6: mod_base = um
  modified_base 7: mod_base = OTHER; note = 2'-fluoroadenosine
  modified_base 8: mod_base = um
  modified_base 9: mod_base = gm
  modified_base 10: mod_base = cm
  modified_base 11: mod_base = um
  modified_base 12: mod_base = um
  modified_base 13: mod_base = OTHER; note = 2'-O-methyladenosine
  modified_base 14: mod_base = OTHER; note = 2'-fluoroguanosine
  modified_base 15: mod_base = cm
  modified_base 16: mod_base = OTHER; note = 2'-fluoroadenosine
  modified_base 17: mod_base = um
  modified_base 18: mod_base = um
  modified_base 19: mod_base = gm
  modified_base 20: mod_base = OTHER; note = 2'-O-methyladenosine
  modified_base 21: mod_base = OTHER; note = 2'-O-methylcytidine with a 3'-phosphorothioate linkage
  modified_base 22: mod_base = OTHER; note = 2'-O-methyluridine with a 3'-phosphorothioate linkage
  modified_base 23: mod_base = OTHER; note = 2'-O-methyladenosine
tgggatatgcttagcattgacta

SEQ ID NO: 1586 - RNA, 21 nt, synthetic construct
  source 1..21: mol_type = other RNA
  modified_base 1: mod_base = OTHER; note = 2'-O-methylcytidine with a 3'-phosphorothioate linkage
  modified_base 2: mod_base = OTHER; note = 2'-O-methyluridine with a 3'-phosphorothioate linkage
  modified_base 3: mod_base = OTHER; note = 2'-O-methyladenosine
  modified_base 4: mod_base = OTHER; note = 2'-O-methyladenosine
  modified_base 5: mod_base = gm
  modified_base 6: mod_base = cm
  modified_base 7: mod_base = OTHER; note = 2'-O-methyladenosine
  modified_base 8: mod_base = um
  modified_base 9: mod_base = OTHER; note = 2'-fluoroadenosine
  modified_base 10: mod_base = OTHER; note = 2'-fluorouridine
  modified_base 11: mod_base = OTHER; note = 2'-fluorocytidine
  modified_base 12: mod_base = cm
  modified_base 13: mod_base = cm
  modified_base 14: mod_base = OTHER; note = 2'-O-methyladenosine
  modified_base 15: mod_base = gm
  modified_base 16: mod_base = cm
  modified_base 17: mod_base = cm
  modified_base 18: mod_base = um
  modified_base 19: mod_base = OTHER; note = 2'-O-methyladenosine with a 3'-phosphorothioate linkage
  modified_base 20: mod_base = OTHER; note = 2'-O-methylcytidine with a 3'-phosphorothioate linkage
  modified_base 21: mod_base = OTHER; note = 2'-O-methyladenosine
ctaagcatatcccagcctaca

SEQ ID NO: 1587 - RNA, 23 nt, synthetic construct
  source 1..23: mol_type = other RNA
  modified_base 1: mod_base = OTHER; note = 2'-O-methyluridine with a 3'-phosphorothioate linkage and a 5'-phosphate substitution
  modified_base 2: mod_base = OTHER; note = 2'-fluoroguanosine with a 3'-phosphorothioate linkage
  modified_base 3: mod_base = um
  modified_base 4: mod_base = OTHER; note = 2'-O-methyladenosine
  modified_base 5: mod_base = OTHER; note = 2'-fluoroguanosine
  modified_base 6: mod_base = gm
  modified_base 7: mod_base = OTHER; note = 2'-fluorocytidine
  modified_base 8: mod_base = um
  modified_base 9: mod_base = gm
  modified_base 10: mod_base = gm
  modified_base 11: mod_base = gm
  modified_base 12: mod_base = OTHER; note = 2'-O-methyladenosine
  modified_base 13: mod_base = um
  modified_base 14: mod_base = OTHER; note = 2'-fluoroadenosine
  modified_base 15: mod_base = um
  modified_base 16: mod_base = OTHER; note = 2'-fluoroguanosine
  modified_base 17: mod_base = cm
  modified_base 18: mod_base = um
  modified_base 19: mod_base = um
  modified_base 20: mod_base = OTHER; note = 2'-O-methyladenosine
  modified_base 21: mod_base = OTHER; note = 2'-O-methylguanosine with a 3'-phosphorothioate linkage
  modified_base 22: mod_base = OTHER; note = 2'-O-methylcytidine with a 3'-phosphorothioate linkage
  modified_base 23: mod_base = OTHER; note = 2'-O-methyladenosine
tgtaggctgggatatgcttagca

SEQ ID NO: 1588 - RNA, 21 nt, synthetic construct
  source 1..21: mol_type = other RNA
  modified_base 1: mod_base = OTHER; note = 2'-O-methyladenosine with a 3'-phosphorothioate linkage
  modified_base 2: mod_base = OTHER; note = 2'-O-methyladenosine with a 3'-phosphorothioate linkage
  modified_base 3: mod_base = gm
  modified_base 4: mod_base = cm
  modified_base 5: mod_base = OTHER; note = 2'-O-methyladenosine
  modified_base 6: mod_base = um
  modified_base 7: mod_base = OTHER; note = 2'-O-methyladenosine
  modified_base 8: mod_base = um
  modified_base 9: mod_base = OTHER; note = 2'-fluorocytidine
  modified_base 10: mod_base = OTHER; note = 2'-fluorocytidine
  modified_base 11: mod_base = OTHER; note = 2'-fluorocytidine
  modified_base 12: mod_base = OTHER; note = 2'-O-methyladenosine
  modified_base 13: mod_base = gm
  modified_base 14: mod_base = cm
  modified_base 15: mod_base = cm
  modified_base 16: mod_base = um
  modified_base 17: mod_base = OTHER; note = 2'-O-methyladenosine
  modified_base 18: mod_base = cm
  modified_base 19: mod_base = OTHER; note = 2'-O-methyladenosine with a 3'-phosphorothioate linkage
  modified_base 20: mod_base = OTHER; note = 2'-O-methyladenosine with a 3'-phosphorothioate linkage
  modified_base 21: mod_base = OTHER; note = 2'-O-methyladenosine
aagcatatcccagcctacaaa

SEQ ID NO: 1589 - RNA, 23 nt, synthetic construct
  source 1..23: mol_type = other RNA
  modified_base 1: mod_base = OTHER; note = 2'-O-methyluridine with a 3'-phosphorothioate linkage and a 5'-phosphate substitution
  modified_base 2: mod_base = OTHER; note = 2'-fluorouridine with a 3'-phosphorothioate linkage
  modified_base 3: mod_base = um
  modified_base 4: mod_base = gm
  modified_base 5: mod_base = OTHER; note = 2'-fluorouridine
  modified_base 6: mod_base = OTHER; note = 2'-O-methyladenosine
  modified_base 7: mod_base = OTHER; note = 2'-fluoroguanosine
  modified_base 8: mod_base = gm
  modified_base 9: mod_base = cm
  modified_base 10: mod_base = um
  modified_base 11: mod_base = gm
  modified_base 12: mod_base = gm
  modified_base 13: mod_base = gm
  modified_base 14: mod_base = OTHER; note = 2'-fluoroadenosine
  modified_base 15: mod_base = um
  modified_base 16: mod_base = OTHER; note = 2'-fluoroadenosine
  modified_base 17: mod_base = um
  modified_base 18: mod_base = gm
  modified_base 19: mod_base = cm
  modified_base 20: mod_base = um
  modified_base 21: mod_base = OTHER; note = 2'-O-methyluridine with a 3'-phosphorothioate linkage
  modified_base 22: mod_base = OTHER; note = 2'-O-methyladenosine with a 3'-phosphorothioate linkage
  modified_base 23: mod_base = gm
tttgtaggctgggatatgcttag

SEQ ID NO: 1590 - RNA, 21 nt, synthetic construct
  source 1..21: mol_type = other RNA
  modified_base 1: mod_base = OTHER; note = 2'-O-methyluridine with a 3'-phosphorothioate linkage
  modified_base 2: mod_base = OTHER; note = 2'-O-methylguanosine with a 3'-phosphorothioate linkage
  modified_base 3: mod_base = gm
  modified_base 4: mod_base = OTHER; note = 2'-O-methyladenosine
  modified_base 5: mod_base = OTHER; note = 2'-O-methyladenosine
  modified_base 6: mod_base = OTHER; note = 2'-O-methyladenosine
  modified_base 7: mod_base = cm
  modified_base 8: mod_base = um
  modified_base 9: mod_base = OTHER; note = 2'-fluorocytidine
  modified_base 10: mod_base = OTHER; note = 2'-fluorouridine
  modified_base 11: mod_base = OTHER; note = 2'-fluoroguanosine
  modified_base 12: mod_base = OTHER; note = 2'-O-methyladenosine
  modified_base 13: mod_base = um
  modified_base 14: mod_base = gm
  modified_base 15: mod_base = gm
  modified_base 16: mod_base = OTHER; note = 2'-O-methyladenosine
  modified_base 17: mod_base = OTHER; note = 2'-O-methyladenosine
  modified_base 18: mod_base = OTHER; note = 2'-O-methyladenosine
  modified_base 19: mod_base = OTHER; note = 2'-O-methylcytidine with a 3'-phosphorothioate linkage
  modified_base 20: mod_base = OTHER; note = 2'-O-methyluridine with a 3'-phosphorothioate linkage
  modified_base 21: mod_base = OTHER; note = 2'-O-methyladenosine
tggaaactctgatggaaacta

SEQ ID NO: 1591 - RNA, 23 nt, synthetic construct
  source 1..23: mol_type = other RNA
  modified_base 1: mod_base = OTHER; note = 2'-O-methyluridine with a 3'-phosphorothioate linkage and a 5'-phosphate substitution
  modified_base 2: mod_base = OTHER; note = 2'-fluoroadenosine with a 3'-phosphorothioate linkage
  modified_base 3: mod_base = gm
  modified_base 4: mod_base = um
  modified_base 5: mod_base = OTHER; note = 2'-fluorouridine
  modified_base 6: mod_base = um
  modified_base 7: mod_base = OTHER; note = 2'-fluorocytidine
  modified_base 8: mod_base = cm
  modified_base 9: mod_base = OTHER; note = 2'-O-methyladenosine
  modified_base 10: mod_base = um
  modified_base 11: mod_base = cm
  modified_base 12: mod_base = OTHER; note = 2'-O-methyladenosine
  modified_base 13: mod_base = gm
  modified_base 14: mod_base = OTHER; note = 2'-fluoroadenosine
  modified_base 15: mod_base = gm
  modified_base 16: mod_base = OTHER; note = 2'-fluorouridine
  modified_base 17: mod_base = um
  modified_base 18: mod_base = um
  modified_base 19: mod_base = cm
  modified_base 20: mod_base = cm
  modified_base 21: mod_base = OTHER; note = 2'-O-methyladenosine with a 3'-phosphorothioate linkage
  modified_base 22: mod_base = OTHER; note = 2'-O-methyladenosine with a 3'-phosphorothioate linkage
  modified_base 23: mod_base = cm
tagtttccatcagagtttccaac

SEQ ID NO: 1592 - RNA, 21 nt, synthetic construct
  source 1..21: mol_type = other RNA
  modified_base 1: mod_base = OTHER; note = 2'-O-methylguanosine with a 3'-phosphorothioate linkage
  modified_base 2: mod_base = OTHER; note = 2'-O-methylguanosine with a 3'-phosphorothioate linkage
  modified_base 3: mod_base = OTHER; note = 2'-O-methyladenosine
  modified_base 4: mod_base = OTHER; note = 2'-O-methyladenosine
  modified_base 5: mod_base = OTHER; note = 2'-O-methyladenosine
  modified_base 6: mod_base = cm
  modified_base 7: mod_base = um
  modified_base 8: mod_base = cm
  modified_base 9: mod_base = OTHER; note = 2'-fluorouridine
  modified_base 10: mod_base = OTHER; note = 2'-fluoroguanosine
  modified_base 11: mod_base = OTHER; note = 2'-fluoroadenosine
  modified_base 12: mod_base = um
  modified_base 13: mod_base = gm
  modified_base 14: mod_base = gm
  modified_base 15: mod_base = OTHER; note = 2'-O-methyladenosine
  modified_base 16: mod_base = OTHER; note = 2'-O-methyladenosine
  modified_base 17: mod_base = OTHER; note = 2'-O-methyladenosine
  modified_base 18: mod_base = cm
  modified_base 19: mod_base = OTHER; note = 2'-O-methyluridine with a 3'-phosphorothioate linkage
  modified_base 20: mod_base = OTHER; note = 2'-O-methylcytidine with a 3'-phosphorothioate linkage
  modified_base 21: mod_base = OTHER; note = 2'-O-methyladenosine
ggaaactctgatggaaactca

SEQ ID NO: 1593 - RNA, 23 nt, synthetic construct
  source 1..23: mol_type = other RNA
  modified_base 1: mod_base = OTHER; note = 2'-O-methyluridine with a 3'-phosphorothioate linkage and a 5'-phosphate substitution
  modified_base 2: mod_base = OTHER; note = 2'-fluoroguanosine with a 3'-phosphorothioate linkage
  modified_base 3: mod_base = OTHER; note = 2'-O-methyladenosine
  modified_base 4: mod_base = gm
  modified_base 5: mod_base = OTHER; note = 2'-fluorouridine
  modified_base 6: mod_base = um
  modified_base 7: mod_base = OTHER; note = 2'-fluorouridine
  modified_base 8: mod_base = cm
  modified_base 9: mod_base = cm
  modified_base 10: mod_base = OTHER; note = 2'-O-methyladenosine
  modified_base 11: mod_base = um
  modified_base 12: mod_base = cm
  modified_base 13: mod_base = OTHER; note = 2'-O-methyladenosine
  modified_base 14: mod_base = OTHER; note = 2'-fluoroguanosine
  modified_base 15: mod_base = OTHER; note = 2'-O-methyladenosine
  modified_base 16: mod_base = OTHER; note = 2'-fluoroguanosine
  modified_base 17: mod_base = um
  modified_base 18: mod_base = um
  modified_base 19: mod_base = um
  modified_base 20: mod_base = cm
  modified_base 21: mod_base = OTHER; note = 2'-O-methylcytidine with a 3'-phosphorothioate linkage
  modified_base 22: mod_base = OTHER; note = 2'-O-methyladenosine with a 3'-phosphorothioate linkage
  modified_base 23: mod_base = OTHER; note = 2'-O-methyladenosine
tgagtttccatcagagtttccaa

SEQ ID NO: 1594 - RNA, 21 nt, synthetic construct
  source 1..21: mol_type = other RNA
  modified_base 1: mod_base = OTHER; note = 2'-O-methylguanosine with a 3'-phosphorothioate linkage
  modified_base 2: mod_base = OTHER; note = 2'-O-methyladenosine with a 3'-phosphorothioate linkage
  modified_base 3: mod_base = OTHER; note = 2'-O-methyladenosine
  modified_base 4: mod_base = OTHER; note = 2'-O-methyladenosine
  modified_base 5: mod_base = cm
  modified_base 6: mod_base = um
  modified_base 7: mod_base = cm
  modified_base 8: mod_base = um
  modified_base 9: mod_base = OTHER; note = 2'-fluoroguanosine
  modified_base 10: mod_base = OTHER; note = 2'-fluoroadenosine
  modified_base 11: mod_base = OTHER; note = 2'-fluorouridine
  modified_base 12: mod_base = gm
  modified_base 13: mod_base = gm
  modified_base 14: mod_base = OTHER; note = 2'-O-methyladenosine
  modified_base 15: mod_base = OTHER; note = 2'-O-methyladenosine
  modified_base 16: mod_base = OTHER; note = 2'-O-methyladenosine
  modified_base 17: mod_base = cm
  modified_base 18: mod_base = um
  modified_base 19: mod_base = OTHER; note = 2'-O-methylcytidine with a 3'-phosphorothioate linkage
  modified_base 20: mod_base = OTHER; note = 2'-O-methyladenosine with a 3'-phosphorothioate linkage
  modified_base 21: mod_base = OTHER; note = 2'-O-methyladenosine
gaaactctgatggaaactcaa

SEQ ID NO: 1595 - RNA, 23 nt, synthetic construct
  source 1..23: mol_type = other RNA
  modified_base 1: mod_base = OTHER; note = 2'-O-methyluridine with a 3'-phosphorothioate linkage and a 5'-phosphate substitution
  modified_base 2: mod_base = OTHER; note = 2'-fluorouridine with a 3'-phosphorothioate linkage
  modified_base 3: mod_base = gm
  modified_base 4: mod_base = OTHER; note = 2'-O-methyladenosine
  modified_base 5: mod_base = OTHER; note = 2'-fluoroguanosine
  modified_base 6: mod_base = um
  modified_base 7: mod_base = OTHER; note = 2'-fluorouridine
  modified_base 8: mod_base = um
  modified_base 9: mod_base = cm
  modified_base 10: mod_base = cm
  modified_base 11: mod_base = OTHER; note = 2'-O-methyladenosine
  modified_base 12: mod_base = um
  modified_base 13: mod_base = cm
  modified_base 14: mod_base = OTHER; note = 2'-fluoroadenosine
  modified_base 15: mod_base = gm
  modified_base 16: mod_base = OTHER; note = 2'-fluoroadenosine
  modified_base 17: mod_base = gm
  modified_base 18: mod_base = um
  modified_base 19: mod_base = um
  modified_base 20: mod_base = um
  modified_base 21: mod_base = OTHER; note = 2'-O-methylcytidine with a 3'-phosphorothioate linkage
  modified_base 22: mod_base = OTHER; note = 2'-O-methylcytidine with a 3'-phosphorothioate linkage
  modified_base 23: mod_base = OTHER; note = 2'-O-methyladenosine
ttgagtttccatcagagtttcca

SEQ ID NO: 1596 - RNA, 21 nt, synthetic construct
  source 1..21: mol_type = other RNA
  modified_base 1: mod_base = OTHER; note = 2'-O-methyladenosine with a 3'-phosphorothioate linkage
  modified_base 2: mod_base = OTHER; note = 2'-O-methyladenosine with a 3'-phosphorothioate linkage
  modified_base 3: mod_base = OTHER; note = 2'-O-methyladenosine
  modified_base 4: mod_base = cm
  modified_base 5: mod_base = um
  modified_base 6: mod_base = cm
  modified_base 7: mod_base = um
  modified_base 8: mod_base = gm
  modified_base 9: mod_base = OTHER; note = 2'-fluoroadenosine
  modified_base 10: mod_base = OTHER; note = 2'-fluorouridine
  modified_base 11: mod_base = OTHER; note = 2'-fluoroguanosine
  modified_base 12: mod_base = gm
  modified_base 13: mod_base = OTHER; note = 2'-O-methyladenosine
  modified_base 14: mod_base = OTHER; note = 2'-O-methyladenosine
  modified_base 15: mod_base = OTHER; note = 2'-O-methyladenosine
  modified_base 16: mod_base = cm
  modified_base 17: mod_base = um
  modified_base 18: mod_base = cm
  modified_base 19: mod_base = OTHER; note = 2'-O-methyladenosine with a 3'-phosphorothioate linkage
  modified_base 20: mod_base = OTHER; note = 2'-O-methyluridine with a 3'-phosphorothioate linkage
  modified_base 21: mod_base = OTHER; note = 2'-O-methyladenosine
aaactctgatggaaactcata

SEQ ID NO: 1597 - RNA, 23 nt, synthetic construct
  source 1..23: mol_type = other RNA
  modified_base 1: mod_base = OTHER; note = 2'-O-methyluridine with a 3'-phosphorothioate linkage and a 5'-phosphate substitution
  modified_base 2: mod_base = OTHER; note = 2'-fluoroadenosine with a 3'-phosphorothioate linkage
  modified_base 3: mod_base = um
  modified_base 4: mod_base = gm
  modified_base 5: mod_base = OTHER; note = 2'-fluoroadenosine
  modified_base 6: mod_base = gm
  modified_base 7: mod_base = OTHER; note = 2'-fluorouridine
  modified_base 8: mod_base = um
  modified_base 9: mod_base = um
  modified_base 10: mod_base = cm
  modified_base 11: mod_base = cm
  modified_base 12: mod_base = OTHER; note = 2'-O-methyladenosine
  modified_base 13: mod_base = um
  modified_base 14: mod_base = OTHER; note = 2'-fluorocytidine
  modified_base 15: mod_base = OTHER; note = 2'-O-methyladenosine
  modified_base 16: mod_base = OTHER; note = 2'-fluoroguanosine
  modified_base 17: mod_base = OTHER; note = 2'-O-methyladenosine
  modified_base 18: mod_base = gm
  modified_base 19: mod_base = um
  modified_base 20: mod_base = um
  modified_base 21: mod_base = OTHER; note = 2'-O-methyluridine with a 3'-phosphorothioate linkage
  modified_base 22: mod_base = OTHER; note = 2'-O-methylcytidine with a 3'-phosphorothioate linkage
  modified_base 23: mod_base = cm
tatgagtttccatcagagtttcc

SEQ ID NO: 1598 - RNA, 21 nt, synthetic construct
  source 1..21: mol_type = other RNA
  modified_base 1: mod_base = OTHER; note = 2'-O-methylguanosine with a 3'-phosphorothioate linkage
  modified_base 2: mod_base = OTHER; note = 2'-O-methyladenosine with a 3'-phosphorothioate linkage
  modified_base 3: mod_base = um
  modified_base 4: mod_base = gm
  modified_base 5: mod_base = gm
  modified_base 6: mod_base = OTHER; note = 2'-O-methyladenosine
  modified_base 7: mod_base = OTHER; note = 2'-O-methyladenosine
  modified_base 8: mod_base = OTHER; note = 2'-O-methyladenosine
  modified_base 9: mod_base = OTHER; note = 2'-fluorocytidine
  modified_base 10: mod_base = OTHER; note = 2'-fluorouridine
  modified_base 11: mod_base = OTHER; note = 2'-fluorocytidine
  modified_base 12: mod_base = OTHER; note = 2'-O-methyladenosine
  modified_base 13: mod_base = um
  modified_base 14: mod_base = gm
  modified_base 15: mod_base = OTHER; note = 2'-O-methyladenosine
  modified_base 16: mod_base = gm
  modified_base 17: mod_base = cm
  modified_base 18: mod_base = gm
  modified_base 19: mod_base = OTHER; note = 2'-O-methyluridine with a 3'-phosphorothioate linkage
  modified_base 20: mod_base = OTHER; note = 2'-O-methylguanosine with a 3'-phosphorothioate linkage
  modified_base 21: mod_base = OTHER; note = 2'-O-methyladenosine
gatggaaactcatgagcgtga

SEQ ID NO: 1599 - RNA, 23 nt, synthetic construct
  source 1..23: mol_type = other RNA
  modified_base 1: mod_base = OTHER; note = 2'-O-methyluridine with a 3'-phosphorothioate linkage and a 5'-phosphate substitution
  modified_base 2: mod_base = OTHER; note = 2'-fluorocytidine with a 3'-phosphorothioate linkage
  modified_base 3: mod_base = OTHER; note = 2'-O-methyladenosine
  modified_base 4: mod_base = cm
  modified_base 5: mod_base = OTHER; note = 2'-fluoroguanosine
  modified_base 6: mod_base = cm
  modified_base 7: mod_base = OTHER; note = 2'-fluorouridine
  modified_base 8: mod_base = cm
  modified_base 9: mod_base = OTHER; note = 2'-O-methyladenosine
  modified_base 10: mod_base = um
  modified_base 11: mod_base = gm
  modified_base 12: mod_base = OTHER; note = 2'-O-methyladenosine
  modified_base 13: mod_base = gm
  modified_base 14: mod_base = OTHER; note = 2'-fluorouridine
  modified_base 15: mod_base = um
  modified_base 16: mod_base = OTHER; note = 2'-fluorouridine
  modified_base 17: mod_base = cm
  modified_base 18: mod_base = cm
  modified_base 19: mod_base = OTHER; note = 2'-O-methyladenosine
  modified_base 20: mod_base = um
  modified_base 21: mod_base = OTHER; note = 2'-O-methylcytidine with a 3'-phosphorothioate linkage
  modified_base 22: mod_base = OTHER; note = 2'-O-methyladenosine with a 3'-phosphorothioate linkage
  modified_base 23: mod_base = gm
tcacgctcatgagtttccatcag

SEQ ID NO: 1600 - RNA, 21 nt, synthetic construct
  source 1..21: mol_type = other RNA
  modified_base 1: mod_base = OTHER; note = 2'-O-methyladenosine with a 3'-phosphorothioate linkage
  modified_base 2: mod_base = OTHER; note = 2'-O-methyluridine with a 3'-phosphorothioate linkage
  modified_base 3: mod_base = gm
  modified_base 4: mod_base = gm
  modified_base 5: mod_base = OTHER; note = 2'-O-methyladenosine
  modified_base 6: mod_base = OTHER; note = 2'-O-methyladenosine
  modified_base 7: mod_base = OTHER; note = 2'-O-methyladenosine
  modified_base 8: mod_base = cm
  modified_base 9: mod_base = OTHER; note = 2'-fluorouridine
  modified_base 10: mod_base = OTHER; note = 2'-fluorocytidine
  modified_base 11: mod_base = OTHER; note = 2'-fluoroadenosine
  modified_base 12: mod_base = um
  modified_base 13: mod_base = gm
  modified_base 14: mod_base = OTHER; note = 2'-O-methyladenosine
  modified_base 15: mod_base = gm
  modified_base 16: mod_base = cm
  modified_base 17: mod_base = gm
  modified_base 18: mod_base = um
  modified_base 19: mod_base = OTHER; note = 2'-O-methylguanosine with a 3'-phosphorothioate linkage
  modified_base 20: mod_base = OTHER; note = 2'-O-methylguanosine with a 3'-phosphorothioate linkage
  modified_base 21: mod_base = OTHER; note = 2'-O-methyladenosine
atggaaactcatgagcgtgga

SEQ ID NO: 1601 - RNA, 23 nt, synthetic construct
  source 1..23: mol_type = other RNA
  modified_base 1: mod_base = OTHER; note = 2'-O-methyluridine with a 3'-phosphorothioate linkage and a 5'-phosphate substitution
  modified_base 2: mod_base = OTHER; note = 2'-fluorocytidine with a 3'-phosphorothioate linkage
  modified_base 3: mod_base = cm
  modified_base 4: mod_base = OTHER; note = 2'-O-methyladenosine
  modified_base 5: mod_base = OTHER; note = 2'-fluorocytidine
  modified_base 6: mod_base = gm
  modified_base 7: mod_base = OTHER; note = 2'-fluorocytidine
  modified_base 8: mod_base = um
  modified_base 9: mod_base = cm
  modified_base 10: mod_base = OTHER; note = 2'-O-methyladenosine
  modified_base 11: mod_base = um
  modified_base 12: mod_base = gm
  modified_base 13: mod_base = OTHER; note = 2'-O-methyladenosine
  modified_base 14: mod_base = OTHER; note = 2'-fluoroguanosine
  modified_base 15: mod_base = um
  modified_base 16: mod_base = OTHER; note = 2'-fluorouridine
  modified_base 17: mod_base = um
  modified_base 18: mod_base = cm
  modified_base 19: mod_base = cm
  modified_base 20: mod_base = OTHER; note = 2'-O-methyladenosine
  modified_base 21: mod_base = OTHER; note = 2'-O-methyluridine with a 3'-phosphorothioate linkage
  modified_base 22: mod_base = OTHER; note = 2'-O-methylcytidine with a 3'-phosphorothioate linkage
  modified_base 23: mod_base = OTHER; note = 2'-O-methyladenosine
tccacgctcatgagtttccatca

SEQ ID NO: 1602 - RNA, 21 nt, synthetic construct
  source 1..21: mol_type = other RNA
  modified_base 1: mod_base = OTHER; note = 2'-O-methyluridine with a 3'-phosphorothioate linkage
  modified_base 2: mod_base = OTHER; note = 2'-O-methylguanosine with a 3'-phosphorothioate linkage
  modified_base 3: mod_base = gm
  modified_base 4: mod_base = OTHER; note = 2'-O-methyladenosine
  modified_base 5: mod_base = OTHER; note = 2'-O-methyladenosine
  modified_base 6: mod_base = OTHER; note = 2'-O-methyladenosine
  modified_base 7: mod_base = cm
  modified_base 8: mod_base = um
  modified_base 9: mod_base = OTHER; note = 2'-fluorocytidine
  modified_base 10: mod_base = OTHER; note = 2'-fluoroadenosine
  modified_base 11: mod_base = OTHER; note = 2'-fluorouridine
  modified_base 12: mod_base = gm
  modified_base 13: mod_base = OTHER; note = 2'-O-methyladenosine
  modified_base 14: mod_base = gm
  modified_base 15: mod_base = cm
  modified_base 16: mod_base = gm
  modified_base 17: mod_base = um
  modified_base 18: mod_base = gm
  modified_base 19: mod_base = OTHER; note = 2'-O-methylguanosine with a 3'-phosphorothioate linkage
  modified_base 20: mod_base = OTHER; note = 2'-O-methyluridine with a 3'-phosphorothioate linkage
  modified_base 21: mod_base = OTHER; note = 2'-O-methyladenosine
tggaaactcatgagcgtggta

SEQ ID NO: 1603 - RNA, 23 nt, synthetic construct
  source 1..23: mol_type = other RNA
  modified_base 1: mod_base = OTHER; note = 2'-O-methyluridine with a 3'-phosphorothioate linkage and a 5'-phosphate substitution
  modified_base 2: mod_base = OTHER; note = 2'-fluoroadenosine with a 3'-phosphorothioate linkage
  modified_base 3: mod_base = cm
  modified_base 4: mod_base = cm
  modified_base 5: mod_base = OTHER; note = 2'-fluoroadenosine
  modified_base 6: mod_base = cm
  modified_base 7: mod_base = OTHER; note = 2'-fluoroguanosine
  modified_base 8: mod_base = cm
  modified_base 9: mod_base = um
  modified_base 10: mod_base = cm
  modified_base 11: mod_base = OTHER; note = 2'-O-methyladenosine
  modified_base 12: mod_base = um
  modified_base 13: mod_base = gm
  modified_base 14: mod_base = OTHER; note = 2'-fluoroadenosine
  modified_base 15: mod_base = gm
  modified_base 16: mod_base = OTHER; note = 2'-fluorouridine
  modified_base 17: mod_base = um
  modified_base 18: mod_base = um
  modified_base 19: mod_base = cm
  modified_base 20: mod_base = cm
  modified_base 21: mod_base = OTHER; note = 2'-O-methyladenosine with a 3'-phosphorothioate linkage
  modified_base 22: mod_base = OTHER; note = 2'-O-methyluridine with a 3'-phosphorothioate linkage
  modified_base 23: mod_base = cm
taccacgctcatgagtttccatc

SEQ ID NO: 1604 - RNA, 21 nt, synthetic construct
  source 1..21: mol_type = other RNA
  modified_base 1: mod_base = OTHER; note = 2'-O-methylguanosine with a 3'-phosphorothioate linkage
  modified_base 2: mod_base = OTHER; note = 2'-O-methylguanosine with a 3'-phosphorothioate linkage
  modified_base 3: mod_base = OTHER; note = 2'-O-methyladenosine
  modified_base 4: mod_base = OTHER; note = 2'-O-methyladenosine
  modified_base 5: mod_base = OTHER; note = 2'-O-methyladenosine
  modified_base 6: mod_base = cm
  modified_base 7: mod_base = um
  modified_base 8: mod_base = cm
  modified_base 9: mod_base = OTHER; note = 2'-fluoroadenosine
  modified_base 10: mod_base = OTHER; note = 2'-fluorouridine
  modified_base 11: mod_base = OTHER; note = 2'-fluoroguanosine
  modified_base 12: mod_base = OTHER; note = 2'-O-methyladenosine
  modified_base 13: mod_base = gm
  modified_base 14: mod_base = cm
  modified_base 15: mod_base = gm
  modified_base 16: mod_base = um
  modified_base 17: mod_base = gm
  modified_base 18: mod_base = gm
  modified_base 19: mod_base = OTHER; note = 2'-O-methyluridine with a 3'-phosphorothioate linkage
  modified_base 20: mod_base = OTHER; note = 2'-O-methylguanosine with a 3'-phosphorothioate linkage
  modified_base 21: mod_base = OTHER; note = 2'-O-methyladenosine
ggaaactcatgagcgtggtga

SEQ ID NO: 1605 - RNA, 23 nt, synthetic construct
  source 1..23: mol_type = other RNA
  modified_base 1: mod_base = OTHER; note = 2'-O-methyluridine with a 3'-phosphorothioate linkage and a 5'-phosphate substitution
  modified_base 2: mod_base = OTHER; note = 2'-fluorocytidine with a 3'-phosphorothioate linkage
  modified_base 3: mod_base = OTHER; note = 2'-O-methyladenosine
  modified_base 4: mod_base = cm
  modified_base 5: mod_base = OTHER; note = 2'-fluorocytidine
  modified_base 6: mod_base = OTHER; note = 2'-O-methyladenosine
  modified_base 7: mod_base = OTHER; note = 2'-fluorocytidine
  modified_base 8: mod_base = gm
  modified_base 9: mod_base = cm
  modified_base 10: mod_base = um
  modified_base 11: mod_base = cm
  modified_base 12: mod_base = OTHER; note = 2'-O-methyladenosine
  modified_base 13: mod_base = um
  modified_base 14: mod_base = OTHER; note = 2'-fluoroguanosine
  modified_base 15: mod_base = OTHER; note = 2'-O-methyladenosine
  modified_base 16: mod_base = OTHER; note = 2'-fluoroguanosine
  modified_base 17: mod_base = um
  modified_base 18: mod_base = um
  modified_base 19: mod_base = um
  modified_base 20: mod_base = cm
  modified_base 21: mod_base = OTHER; note = 2'-O-methylcytidine with a 3'-phosphorothioate linkage
  modified_base 22: mod_base = OTHER; note = 2'-O-methyladenosine with a 3'-phosphorothioate linkage
  modified_base 23: mod_base = um
tcaccacgctcatgagtttccat

SEQ ID NO: 1606 - RNA, 21 nt, synthetic construct
  source 1..21: mol_type = other RNA
  modified_base 1: mod_base = OTHER; note = 2'-O-methylguanosine with a 3'-phosphorothioate linkage
  modified_base 2: mod_base = OTHER; note = 2'-O-methyladenosine with a 3'-phosphorothioate linkage
  modified_base 3: mod_base = OTHER; note = 2'-O-methyladenosine
  modified_base 4: mod_base = OTHER; note = 2'-O-methyladenosine
  modified_base 5: mod_base = cm
  modified_base 6: mod_base = um
  modified_base 7: mod_base = cm
  modified_base 8: mod_base = OTHER; note = 2'-O-methyladenosine
  modified_base 9: mod_base = OTHER; note = 2'-fluorouridine
  modified_base 10: mod_base = OTHER; note = 2'-fluoroguanosine
  modified_base 11: mod_base = OTHER; note = 2'-fluoroadenosine
  modified_base 12: mod_base = gm
  modified_base 13: mod_base = cm
  modified_base 14: mod_base = gm
  modified_base 15: mod_base = um
  modified_base 16: mod_base = gm
  modified_base 17: mod_base = gm
  modified_base 18: mod_base = um
  modified_base 19: mod_base = OTHER; note = 2'-O-methylguanosine with a 3'-phosphorothioate linkage
  modified_base 20: mod_base = OTHER; note = 2'-O-methyluridine with a 3'-phosphorothioate linkage
  modified_base 21: mod_base = OTHER; note = 2'-O-methyladenosine
gaaactcatgagcgtggtgta

SEQ ID NO: 1607 - RNA, 23 nt, synthetic construct
  source 1..23: mol_type = other RNA
  modified_base 1: mod_base = OTHER; note = 2'-O-methyluridine with a 3'-phosphorothioate linkage and a 5'-phosphate substitution
  modified_base 2: mod_base = OTHER; note = 2'-fluoroadenosine with a 3'-phosphorothioate linkage
  modified_base 3: mod_base = cm
  modified_base 4: mod_base = OTHER; note = 2'-O-methyladenosine
  modified_base 5: mod_base = OTHER; note = 2'-fluorocytidine
  modified_base 6: mod_base = cm
  modified_base 7: mod_base = OTHER; note = 2'-fluoroadenosine
  modified_base 8: mod_base = cm
  modified_base 9: mod_base = gm
  modified_base 10: mod_base = cm
  modified_base 11: mod_base = um
  modified_base 12: mod_base = cm
  modified_base 13: mod_base = OTHER; note = 2'-O-methyladenosine
  modified_base 14: mod_base = OTHER; note = 2'-fluorouridine
  modified_base 15: mod_base = gm
  modified_base 16: mod_base = OTHER; note = 2'-fluoroadenosine
  modified_base 17: mod_base = gm
  modified_base 18: mod_base = um
  modified_base 19: mod_base = um
  modified_base 20: mod_base = um
  modified_base 21: mod_base = OTHER; note = 2'-O-methylcytidine with a 3'-phosphorothioate linkage
  modified_base 22: mod_base = OTHER; note = 2'-O-methylcytidine with a 3'-phosphorothioate linkage
  modified_base 23: mod_base = OTHER; note = 2'-O-methyladenosine
tacaccacgctcatgagtttcca

SEQ ID NO: 1608 - RNA, 21 nt, synthetic construct
  source 1..21: mol_type = other RNA
  modified_base 1: mod_base = OTHER; note = 2'-O-methyladenosine with a 3'-phosphorothioate linkage
  modified_base 2: mod_base = OTHER; note = 2'-O-methylguanosine with a 3'-phosphorothioate linkage
  modified_base 3: mod_base = cm
  modified_base 4: mod_base = gm
  modified_base 5: mod_base = um
  modified_base 6: mod_base = gm
  modified_base 7: mod_base = gm
  modified_base 8: mod_base = um
  modified_base 9: mod_base = OTHER; note = 2'-fluoroguanosine
  modified_base 10: mod_base = OTHER; note = 2'-fluorouridine
  modified_base 11: mod_base = OTHER; note = 2'-fluoroadenosine
  modified_base 12: mod_base = um
  modified_base 13: mod_base = cm
  modified_base 14: mod_base = um
  modified_base 15: mod_base = OTHER; note = 2'-O-methyladenosine
  modified_base 16: mod_base = um
  modified_base 17: mod_base = um
  modified_base 18: mod_base = cm
  modified_base 19: mod_base = OTHER; note = 2'-O-methylguanosine with a 3'-phosphorothioate linkage
  modified_base 20: mod_base = OTHER; note = 2'-O-methylcytidine with a 3'-phosphorothioate linkage
  modified_base 21: mod_base = OTHER; note = 2'-O-methyladenosine
agcgtggtgtatctattcgca

SEQ ID NO: 1609 - RNA, 23 nt, synthetic construct
  source 1..23: mol_type = other RNA
  modified_base 1: mod_base = OTHER; note = 2'-O-methyluridine with a 3'-phosphorothioate linkage and a 5'-phosphate substitution
  modified_base 2: mod_base = OTHER; note = 2'-fluoroguanosine with a 3'-phosphorothioate linkage
  modified_base 3: mod_base = cm
  modified_base 4: mod_base = gm
  modified_base 5: mod_base = OTHER; note = 2'-fluoroadenosine
  modified_base 6: mod_base = OTHER; note = 2'-O-methyladenosine
  modified_base 7: mod_base = OTHER; note = 2'-fluorouridine
  modified_base 8: mod_base = OTHER; note = 2'-O-methyladenosine
  modified_base 9: mod_base = gm
  modified_base 10: mod_base = OTHER; note = 2'-O-methyladenosine
  modified_base 11: mod_base = um
  modified_base 12: mod_base = OTHER; note = 2'-O-methyladenosine
  modified_base 13: mod_base = cm
  modified_base 14: mod_base = OTHER; note = 2'-fluoroadenosine
  modified_base 15: mod_base = cm
  modified_base 16: mod_base = OTHER; note = 2'-fluorocytidine
  modified_base 17: mod_base = OTHER; note = 2'-O-methyladenosine
  modified_base 18: mod_base = cm
  modified_base 19: mod_base = gm
  modified_base 20: mod_base = cm
  modified_base 21: mod_base = OTHER; note = 2'-O-methyluridine with a 3'-phosphorothioate linkage
  modified_base 22: mod_base = OTHER; note = 2'-O-methylcytidine with a 3'-phosphorothioate linkage
  modified_base 23: mod_base = OTHER; note = 2'-O-methyladenosine
tgcgaatagatacaccacgctca

SEQ ID NO: 1610 - RNA, 21 nt, synthetic construct
  source 1..21: mol_type = other RNA
  modified_base 1: mod_base = OTHER; note = 2'-O-methyluridine with a 3'-phosphorothioate linkage
  modified_base 2: mod_base = OTHER; note = 2'-O-methyladenosine with a 3'-phosphorothioate linkage
  modified_base 3: mod_base = cm
  modified_base 4: mod_base = cm
  modified_base 5: mod_base = um
  modified_base 6: mod_base = um
  modified_base 7: mod_base = OTHER; note = 2'-O-methyladenosine
  modified_base 8: mod_base = cm
  modified_base 9: mod_base = OTHER; note = 2'-fluoroadenosine
  modified_base 10: mod_base = OTHER; note = 2'-fluoroguanosine
  modified_base 11: mod_base = OTHER; note = 2'-fluoroguanosine
  modified_base 12: mod_base = gm
  modified_base 13: mod_base = OTHER; note = 2'-O-methyladenosine
  modified_base 14: mod_base = um
  modified_base 15: mod_base = um
  modified_base 16: mod_base = OTHER; note = 2'-O-methyladenosine
  modified_base 17: mod_base = um
  modified_base 18: mod_base = OTHER; note = 2'-O-methyladenosine
  modified_base 19: mod_base = OTHER; note = 2'-O-methyladenosine with a 3'-phosphorothioate linkage
  modified_base 20: mod_base = OTHER; note = 2'-O-methyluridine with a 3'-phosphorothioate linkage
  modified_base 21: mod_base = OTHER; note = 2'-O-methyladenosine
taccttacagggattataata

SEQ ID NO: 1611 - RNA, 23 nt, synthetic construct
  source 1..23: mol_type = other RNA
  modified_base 1: mod_base = OTHER; note = 2'-O-methyluridine with a 3'-phosphorothioate linkage and a 5'-phosphate substitution
  modified_base 2: mod_base = OTHER; note = 2'-fluoroadenosine with a 3'-phosphorothioate linkage
  modified_base 3: mod_base = um
  modified_base 4: mod_base = um
  modified_base 5: mod_base = OTHER; note = 2'-fluoroadenosine
  modified_base 6: mod_base = um
  modified_base 7: mod_base = OTHER; note = 2'-fluoroadenosine
  modified_base 8: mod_base = OTHER; note = 2'-O-methyladenosine
  modified_base 9: mod_base = um
  modified_base 10: mod_base = cm
  modified_base 11: mod_base = cm
  modified_base 12: mod_base = cm
  modified_base 13: mod_base = um
  modified_base 14: mod_base = OTHER; note = 2'-fluoroguanosine
  modified_base 15: mod_base = um
  modified_base 16: mod_base = OTHER; note = 2'-fluoroadenosine
  modified_base 17: mod_base = OTHER; note = 2'-O-methyladenosine
  modified_base 18: mod_base = gm
  modified_base 19: mod_base = gm
  modified_base 20: mod_base = um
  modified_base 21: mod_base = OTHER; note = 2'-O-methyladenosine with a 3'-phosphorothioate linkage
  modified_base 22: mod_base = OTHER; note = 2'-O-methylguanosine with a 3'-phosphorothioate linkage
  modified_base 23: mod_base = gm
tattataatccctgtaaggtagg

SEQ ID NO: 1612 - RNA, 21 nt, synthetic construct
  source 1..21: mol_type = other RNA
  modified_base 1: mod_base = OTHER; note = 2'-O-methyladenosine with a 3'-phosphorothioate linkage
  modified_base 2: mod_base = OTHER; note = 2'-O-methylcytidine with a 3'-phosphorothioate linkage
  modified_base 3: mod_base = cm
  modified_base 4: mod_base = um
  modified_base 5: mod_base = um
  modified_base 6: mod_base = OTHER; note = 2'-O-methyladenosine
  modified_base 7: mod_base = cm
  modified_base 8: mod_base = OTHER; note = 2'-O-methyladenosine
  modified_base 9: mod_base = OTHER; note = 2'-fluoroguanosine
  modified_base 10: mod_base = OTHER; note = 2'-fluoroguanosine
  modified_base 11: mod_base = OTHER; note = 2'-fluoroguanosine
  modified_base 12: mod_base = OTHER; note = 2'-O-methyladenosine
  modified_base 13: mod_base = um
  modified_base 14: mod_base = um
  modified_base 15: mod_base = OTHER; note = 2'-O-methyladenosine
  modified_base 16: mod_base = um
  modified_base 17: mod_base = OTHER; note = 2'-O-methyladenosine
  modified_base 18: mod_base = OTHER; note = 2'-O-methyladenosine
  modified_base 19: mod_base = OTHER; note = 2'-O-methyluridine with a 3'-phosphorothioate linkage
  modified_base 20: mod_base = OTHER; note = 2'-O-methyluridine with a 3'-phosphorothioate linkage
  modified_base 21: mod_base = OTHER; note = 2'-O-methyladenosine
accttacagggattataatta

SEQ ID NO: 1613 - RNA, 23 nt, synthetic construct
  source 1..23: mol_type = other RNA
  modified_base 1: mod_base = OTHER; note = 2'-O-methyluridine with a 3'-phosphorothioate linkage and a 5'-phosphate substitution
  modified_base 2: mod_base = OTHER; note = 2'-fluoroadenosine with a 3'-phosphorothioate linkage
  modified_base 3: mod_base = OTHER; note = 2'-O-methyladenosine
  modified_base 4: mod_base = um
  modified_base 5: mod_base = OTHER; note = 2'-fluorouridine
  modified_base 6: mod_base = OTHER; note = 2'-O-methyladenosine
  modified_base 7: mod_base = OTHER; note = 2'-fluorouridine
  modified_base 8: mod_base = OTHER; note = 2'-O-methyladenosine
  modified_base 9: mod_base = OTHER; note = 2'-O-methyladenosine
  modified_base 10: mod_base = um
  modified_base 11: mod_base = cm
  modified_base 12: mod_base = cm
  modified_base 13: mod_base = cm
  modified_base 14: mod_base = OTHER; note = 2'-fluorouridine
  modified_base 15: mod_base = gm
  modified_base 16: mod_base = OTHER; note = 2'-fluorouridine
  modified_base 17: mod_base = OTHER; note = 2'-O-methyladenosine
  modified_base 18: mod_base = OTHER; note = 2'-O-methyladenosine
  modified_base 19: mod_base = gm
  modified_base 20: mod_base = gm
  modified_base 21: mod_base = OTHER; note = 2'-O-methyluridine with a 3'-phosphorothioate linkage
  modified_base 22: mod_base = OTHER; note = 2'-O-methyladenosine with a 3'-phosphorothioate linkage
  modified_base 23: mod_base = gm
taattataatccctgtaaggtag

SEQ ID NO: 1614 - RNA, 21 nt, synthetic construct
  source 1..21: mol_type = other RNA
  modified_base 1: mod_base = OTHER; note = 2'-O-methylguanosine with a 3'-phosphorothioate linkage
  modified_base 2: mod_base = OTHER; note = 2'-O-methylguanosine with a 3'-phosphorothioate linkage
  modified_base 3: mod_base = gm
  modified_base 4: mod_base = OTHER; note = 2'-O-methyladenosine
  modified_base 5: mod_base = um
  modified_base 6: mod_base = um
  modified_base 7: mod_base = OTHER; note = 2'-O-methyladenosine
  modified_base 8: mod_base = um
  modified_base 9: mod_base = OTHER; note = 2'-fluoroadenosine
  modified_base 10: mod_base = OTHER; note = 2'-fluoroadenosine
  modified_base 11: mod_base = OTHER; note = 2'-fluorouridine
  modified_base 12: mod_base = um
  modified_base 13: mod_base = OTHER; note = 2'-O-methyladenosine
  modified_base 14: mod_base = cm
  modified_base 15: mod_base = um
  modified_base 16: mod_base = cm
  modified_base 17: mod_base = cm
  modified_base 18: mod_base = um
  modified_base 19: mod_base = OTHER; note = 2'-O-methyluridine with a 3'-phosphorothioate linkage
  modified_base 20: mod_base = OTHER; note = 2'-O-methylguanosine with a 3'-phosphorothioate linkage
  modified_base 21: mod_base = OTHER; note = 2'-O-methyladenosine
gggattataattactccttga

SEQ ID NO: 1615 - RNA, 23 nt, synthetic construct
  source 1..23: mol_type = other RNA
  modified_base 1: mod_base = OTHER; note = 2'-O-methyluridine with a 3'-phosphorothioate linkage and a 5'-phosphate substitution
  modified_base 2: mod_base = OTHER; note = 2'-fluorocytidine with a 3'-phosphorothioate linkage
  modified_base 3: mod_base = OTHER; note = 2'-O-methyladenosine
  modified_base 4: mod_base = OTHER; note = 2'-O-methyladenosine
  modified_base 5: mod_base = OTHER; note = 2'-fluoroguanosine
  modified_base 6: mod_base = gm
  modified_base 7: mod_base = OTHER; note = 2'-fluoroadenosine
  modified_base 8: mod_base = gm
  modified_base 9: mod_base = um
  modified_base 10: mod_base = OTHER; note = 2'-O-methyladenosine
  modified_base 11: mod_base = OTHER; note = 2'-O-methyladenosine
  modified_base 12: mod_base = um
  modified_base 13: mod_base = um
  modified_base 14: mod_base = OTHER; note = 2'-fluoroadenosine
  modified_base 15: mod_base = um
  modified_base 16: mod_base = OTHER; note = 2'-fluoroadenosine
  modified_base 17: mod_base = OTHER; note = 2'-O-methyladenosine
  modified_base 18: mod_base = um
  modified_base 19: mod_base = cm
  modified_base 20: mod_base = cm
  modified_base 21: mod_base = OTHER; note = 2'-O-methylcytidine with a 3'-phosphorothioate linkage
  modified_base 22: mod_base = OTHER; note = 2'-O-methyluridine with a 3'-phosphorothioate linkage
  modified_base 23: mod_base = gm
tcaaggagtaattataatccctg

SEQ ID NO: 1616 - RNA, 21 nt, synthetic construct
  source 1..21: mol_type = other RNA
  modified_base 1: mod_base = OTHER; note = 2'-O-methylguanosine with a 3'-phosphorothioate linkage
  modified_base 2: mod_base = OTHER; note = 2'-O-methylguanosine with a 3'-phosphorothioate linkage
  modified_base 3: mod_base = OTHER; note = 2'-O-methyladenosine
  modified_base 4: mod_base = um
  modified_base 5: mod_base = um
  modified_base 6: mod_base = OTHER; note = 2'-O-methyladenosine
  modified_base 7: mod_base = um
  modified_base 8: mod_base = OTHER; note = 2'-O-methyladenosine
  modified_base 9: mod_base = OTHER; note = 2'-fluoroadenosine
  modified_base 10: mod_base = OTHER; note = 2'-fluorouridine
  modified_base 11: mod_base = OTHER; note = 2'-fluorouridine
  modified_base 12: mod_base = OTHER; note = 2'-O-methyladenosine
  modified_base 13: mod_base = cm
  modified_base 14: mod_base = um
  modified_base 15: mod_base = cm
  modified_base 16: mod_base = cm
  modified_base 17: mod_base = um
  modified_base 18: mod_base = um
  modified_base 19: mod_base = OTHER; note = 2'-O-methylguanosine with a 3'-phosphorothioate linkage
  modified_base 20: mod_base = OTHER; note = 2'-O-methylguanosine with a 3'-phosphorothioate linkage
  modified_base 21: mod_base = OTHER; note = 2'-O-methyladenosine
ggattataattactccttgga

SEQ ID NO: 1617 - RNA, 23 nt, synthetic construct
  source 1..23: mol_type = other RNA
  modified_base 1: mod_base = OTHER; note = 2'-O-methyluridine with a 3'-phosphorothioate linkage and a 5'-phosphate substitution
  modified_base 2: mod_base = OTHER; note = 2'-fluorocytidine with a 3'-phosphorothioate linkage
  modified_base 3: mod_base = cm
  modified_base 4: mod_base = OTHER; note = 2'-O-methyladenosine
  modified_base 5: mod_base = OTHER; note = 2'-fluoroadenosine
  modified_base 6: mod_base = gm
  modified_base 7: mod_base = OTHER; note = 2'-fluoroguanosine
  modified_base 8: mod_base = OTHER; note = 2'-O-methyladenosine
  modified_base 9: mod_base = gm
  modified_base 10: mod_base = um
  modified_base 11: mod_base = OTHER; note = 2'-O-methyladenosine
  modified_base 12: mod_base = OTHER; note = 2'-O-methyladenosine
  modified_base 13: mod_base = um
  modified_base 14: mod_base = OTHER; note = 2'-fluorouridine
  modified_base 15: mod_base = OTHER; note = 2'-O-methyladenosine
  modified_base 16: mod_base = OTHER; note = 2'-fluorouridine
  modified_base 17: mod_base = OTHER; note = 2'-O-methyladenosine
  modified_base 18: mod_base = OTHER; note = 2'-O-methyladenosine
  modified_base 19: mod_base = um
  modified_base 20: mod_base = cm
  modified_base 21: mod_base = OTHER; note = 2'-O-methylcytidine with a 3'-phosphorothioate linkage
  modified_base 22: mod_base = OTHER; note = 2'-O-methylcytidine with a 3'-phosphorothioate linkage
  modified_base 23: mod_base = um
tccaaggagtaattataatccct

SEQ ID NO: 1618 - RNA, 21 nt, synthetic construct
  source 1..21: mol_type = other RNA
  modified_base 1: mod_base = OTHER; note = 2'-O-methylguanosine with a 3'-phosphorothioate linkage
  modified_base 2: mod_base = OTHER; note = 2'-O-methyladenosine with a 3'-phosphorothioate linkage
  modified_base 3: mod_base = um
  modified_base 4: mod_base = um
  modified_base 5: mod_base = OTHER; note = 2'-O-methyladenosine
  modified_base 6: mod_base = um
  modified_base 7: mod_base = OTHER; note = 2'-O-methyladenosine
  modified_base 8: mod_base = OTHER; note = 2'-O-methyladenosine
  modified_base 9: mod_base = OTHER; note = 2'-fluorouridine
  modified_base 10: mod_base = OTHER; note = 2'-fluorouridine
  modified_base 11: mod_base = OTHER; note = 2'-fluoroadenosine
  modified_base 12: mod_base = cm
  modified_base 13: mod_base = um
  modified_base 14: mod_base = cm
  modified_base 15: mod_base = cm
  modified_base 16: mod_base = um
  modified_base 17: mod_base = um
  modified_base 18: mod_base = gm
  modified_base 19: mod_base = OTHER; note = 2'-O-methylguanosine with a 3'-phosphorothioate linkage
  modified_base 20: mod_base = OTHER; note = 2'-O-methyluridine with a 3'-phosphorothioate linkage
  modified_base 21: mod_base = OTHER; note = 2'-O-methyladenosine
gattataattactccttggta

SEQ ID NO: 1619 - RNA, 23 nt, synthetic construct
  source 1..23: mol_type = other RNA
  modified_base 1: mod_base = OTHER; note = 2'-O-methyluridine with a 3'-phosphorothioate linkage and a 5'-phosphate substitution
  modified_base 2: mod_base = OTHER; note = 2'-fluoroadenosine with a 3'-phosphorothioate linkage
  modified_base 3: mod_base = cm
  modified_base 4: mod_base = cm
  modified_base 5: mod_base = OTHER; note = 2'-fluoroadenosine
  modified_base 6: mod_base = OTHER; note = 2'-O-methyladenosine
  modified_base 7: mod_base = OTHER; note = 2'-fluoroguanosine
  modified_base 8: mod_base = gm
  modified_base 9: mod_base = OTHER; note = 2'-O-methyladenosine
  modified_base 10: mod_base = gm
  modified_base 11: mod_base = um
  modified_base 12: mod_base = OTHER; note = 2'-O-methyladenosine
  modified_base 13: mod_base = OTHER; note = 2'-O-methyladenosine
  modified_base 14: mod_base = OTHER; note = 2'-fluorouridine
  modified_base 15: mod_base = um
  modified_base 16: mod_base = OTHER; note = 2'-fluoroadenosine
  modified_base 17: mod_base = um
  modified_base 18: mod_base = OTHER; note = 2'-O-methyladenosine
  modified_base 19: mod_base = OTHER; note = 2'-O-methyladenosine
  modified_base 20: mod_base = um
  modified_base 21: mod_base = OTHER; note = 2'-O-methylcytidine with a 3'-phosphorothioate linkage
  modified_base 22: mod_base = OTHER; note = 2'-O-methylcytidine with a 3'-phosphorothioate linkage
  modified_base 23: mod_base = cm
taccaaggagtaattataatccc

SEQ ID NO: 1620 - RNA, 21 nt, synthetic construct
  source 1..21: mol_type = other RNA
  modified_base 1: mod_base = OTHER; note = 2'-O-methyladenosine with a 3'-phosphorothioate linkage
  modified_base 2: mod_base = OTHER; note = 2'-O-methyluridine with a 3'-phosphorothioate linkage
  modified_base 3: mod_base = um
  modified_base 4: mod_base = OTHER; note = 2'-O-methyladenosine
  modified_base 5: mod_base = um
  modified_base 6: mod_base = OTHER; note = 2'-O-methyladenosine
  modified_base 7: mod_base = OTHER; note = 2'-O-methyladenosine
  modified_base 8: mod_base = um
  modified_base 9: mod_base = OTHER; note = 2'-fluorouridine
  modified_base 10: mod_base = OTHER; note = 2'-fluoroadenosine
  modified_base 11: mod_base = OTHER; note = 2'-fluorocytidine
  modified_base 12: mod_base = um
  modified_base 13: mod_base = cm
  modified_base 14: mod_base = cm
  modified_base 15: mod_base = um
  modified_base 16: mod_base = um
  modified_base 17: mod_base = gm
  modified_base 18: mod_base = gm
  modified_base 19: mod_base = OTHER; note = 2'-O-methyluridine with a 3'-phosphorothioate linkage
  modified_base 20: mod_base = OTHER; note = 2'-O-methylguanosine with a 3'-phosphorothioate linkage
  modified_base 21: mod_base = OTHER; note = 2'-O-methyladenosine
attataattactccttggtga

SEQ ID NO: 1621 - RNA, 23 nt, synthetic construct
  source 1..23: mol_type = other RNA
  modified_base 1: mod_base = OTHER; note = 2'-O-methyluridine with a 3'-phosphorothioate linkage and a 5'-phosphate substitution
  modified_base 2: mod_base = OTHER; note = 2'-fluorocytidine with a 3'-phosphorothioate linkage
  modified_base 3: mod_base = OTHER; note = 2'-O-methyladenosine
  modified_base 4: mod_base = cm
  modified_base 5: mod_base = OTHER; note = 2'-fluorocytidine
  modified_base 6: mod_base = OTHER; note = 2'-O-methyladenosine
  modified_base 7: mod_base = OTHER; note = 2'-fluoroadenosine
  modified_base 8: mod_base = gm
  modified_base 9: mod_base = gm
  modified_base 10: mod_base = OTHER; note = 2'-O-methyladenosine
  modified_base 11: mod_base = gm
  modified_base 12: mod_base = um
  modified_base 13: mod_base = OTHER; note = 2'-O-methyladenosine
  modified_base 14: mod_base = OTHER; note = 2'-fluoroadenosine
  modified_base 15: mod_base = um
  modified_base 16: mod_base = OTHER; note = 2'-fluorouridine
  modified_base 17: mod_base = OTHER; note = 2'-O-methyladenosine
  modified_base 18: mod_base = um
  modified_base 19: mod_base = OTHER; note = 2'-O-methyladenosine
  modified_base 20: mod_base = OTHER; note = 2'-O-methyladenosine
  modified_base 21: mod_base = OTHER; note = 2'-O-methyluridine with a 3'-phosphorothioate linkage
  modified_base 22: mod_base = OTHER; note = 2'-O-methylcytidine with a 3'-phosphorothioate linkage
  modified_base 23: mod_base = cm
tcaccaaggagtaattataatcc

SEQ ID NO: 1622 - RNA, 21 nt, synthetic construct
  source 1..21: mol_type = other RNA
  modified_base 1: mod_base = OTHER; note = 2'-O-methyladenosine with a 3'-phosphorothioate linkage
  modified_base 2: mod_base = OTHER; note = 2'-O-methyladenosine with a 3'-phosphorothioate linkage
  modified_base 3: mod_base = um
  modified_base 4: mod_base = um
  modified_base 5: mod_base = OTHER; note = 2'-O-methyladenosine
  modified_base 6: mod_base = cm
  modified_base 7: mod_base = um
  modified_base 8: mod_base = cm
  modified_base 9: mod_base = OTHER; note = 2'-fluorocytidine
  modified_base 10: mod_base = OTHER; note = 2'-fluorouridine
  modified_base 11: mod_base = OTHER; note = 2'-fluorouridine
  modified_base 12: mod_base = gm
  modified_base 13: mod_base = gm
  modified_base 14: mod_base = um
  modified_base 15: mod_base = gm
  modified_base 16: mod_base = OTHER; note = 2'-O-methyladenosine
  modified_base 17: mod_base = um
  modified_base 18: mod_base = gm
  modified_base 19: mod_base = OTHER; note = 2'-O-methylguanosine with a 3'-phosphorothioate linkage
  modified_base 20: mod_base = OTHER; note = 2'-O-methylguanosine with a 3'-phosphorothioate linkage
  modified_base 21: mod_base = OTHER; note = 2'-O-methyladenosine
aattactccttggtgatggga

SEQ ID NO: 1623 - RNA, 23 nt, synthetic construct
  source 1..23: mol_type = other RNA
  modified_base 1: mod_base = OTHER; note = 2'-O-methyluridine with a 3'-phosphorothioate linkage and a 5'-phosphate substitution
  modified_base 2: mod_base = OTHER; note = 2'-fluorocytidine with a 3'-phosphorothioate linkage
  modified_base 3: mod_base = cm
  modified_base 4: mod_base = cm
  modified_base 5: mod_base = OTHER; note = 2'-fluoroadenosine
  modified_base 6: mod_base = um
  modified_base 7: mod_base = OTHER; note = 2'-fluorocytidine
  modified_base 8: mod_base = OTHER; note = 2'-O-methyladenosine
  modified_base 9: mod_base = cm
  modified_base 10: mod_base = cm
  modified_base 11: mod_base = OTHER; note = 2'-O-methyladenosine
  modified_base 12: mod_base = OTHER; note = 2'-O-methyladenosine
  modified_base 13: mod_base = gm
  modified_base 14: mod_base = OTHER; note = 2'-fluoroguanosine
  modified_base 15: mod_base = OTHER; note = 2'-O-methyladenosine
  modified_base 16: mod_base = OTHER; note = 2'-fluoroguanosine
  modified_base 17: mod_base = um
  modified_base 18: mod_base = OTHER; note = 2'-O-methyladenosine
  modified_base 19: mod_base = OTHER; note = 2'-O-methyladenosine
  modified_base 20: mod_base = um
  modified_base 21: mod_base = OTHER; note = 2'-O-methyluridine with a 3'-phosphorothioate linkage
  modified_base 22: mod_base = OTHER; note = 2'-O-methyladenosine with a 3'-phosphorothioate linkage
  modified_base 23: mod_base = um
tcccatcaccaaggagtaattat

SEQ ID NO: 1624 - RNA, 21 nt, synthetic construct
  source 1..21: mol_type = other RNA
  modified_base 1: mod_base = OTHER; note = 2'-O-methyladenosine with a 3'-phosphorothioate linkage
  modified_base 2: mod_base = OTHER; note = 2'-O-methyluridine with a 3'-phosphorothioate linkage
  modified_base 3: mod_base = um
  modified_base 4: mod_base = OTHER; note = 2'-O-methyladenosine
  modified_base 5: mod_base = cm
  modified_base 6: mod_base = um
  modified_base 7: mod_base = cm
  modified_base 8: mod_base = cm
  modified_base 9: mod_base = OTHER; note = 2'-fluorouridine
  modified_base 10: mod_base = OTHER; note = 2'-fluorouridine
  modified_base 11: mod_base = OTHER; note = 2'-fluoroguanosine
  modified_base 12: mod_base = gm
  modified_base 13: mod_base = um
  modified_base 14: mod_base = gm
  modified_base 15: mod_base = OTHER; note = 2'-O-methyladenosine
  modified_base 16: mod_base = um
  modified_base 17: mod_base = gm
  modified_base 18: mod_base = gm
  modified_base 19: mod_base = OTHER; note = 2'-O-methylguanosine with a 3'-phosphorothioate linkage
  modified_base 20: mod_base = OTHER; note = 2'-O-methyladenosine with a 3'-phosphorothioate linkage
  modified_base 21: mod_base = OTHER; note = 2'-O-methyladenosine
attactccttggtgatgggaa

SEQ ID NO: 1625 - RNA, 23 nt, synthetic construct
  source 1..23: mol_type = other RNA
  modified_base 1: mod_base = OTHER; note = 2'-O-methyluridine with a 3'-phosphorothioate linkage and a 5'-phosphate substitution
  modified_base 2: mod_base = OTHER; note = 2'-fluorouridine with a 3'-phosphorothioate linkage
  modified_base 3: mod_base = cm
  modified_base 4: mod_base = cm
  modified_base 5: mod_base = OTHER; note = 2'-fluorocytidine
  modified_base 6: mod_base = OTHER; note = 2'-O-methyladenosine
  modified_base 7: mod_base = OTHER; note = 2'-fluorouridine
  modified_base 8: mod_base = cm
  modified_base 9: mod_base = OTHER; note = 2'-O-methyladenosine
  modified_base 10: mod_base = cm
  modified_base 11: mod_base = cm
  modified_base 12: mod_base = OTHER; note = 2'-O-methyladenosine
  modified_base 13: mod_base = OTHER; note = 2'-O-methyladenosine
  modified_base 14: mod_base = OTHER; note = 2'-fluoroguanosine
  modified_base 15: mod_base = gm
  modified_base 16: mod_base = OTHER; note = 2'-fluoroadenosine
  modified_base 17: mod_base = gm
  modified_base 18: mod_base = um
  modified_base 19: mod_base = OTHER; note = 2'-O-methyladenosine
  modified_base 20: mod_base = OTHER; note = 2'-O-methyladenosine
  modified_base 21: mod_base = OTHER; note = 2'-O-methyluridine with a 3'-phosphorothioate linkage
  modified_base 22: mod_base = OTHER; note = 2'-O-methyluridine with a 3'-phosphorothioate linkage
  modified_base 23: mod_base = OTHER; note = 2'-O-methyladenosine
ttcccatcaccaaggagtaatta

SEQ ID NO: 1626 - RNA, 21 nt, synthetic construct
  source 1..21: mol_type = other RNA
  modified_base 1: mod_base = OTHER; note = 2'-O-methylcytidine with a 3'-phosphorothioate linkage
  modified_base 2: mod_base = OTHER; note = 2'-O-methylcytidine with a 3'-phosphorothioate linkage
  modified_base 3: mod_base = um
  modified_base 4: mod_base = um
  modified_base 5: mod_base = gm
  modified_base 6: mod_base = gm
  modified_base 7: mod_base = um
  modified_base 8: mod_base = gm
  modified_base 9: mod_base = OTHER; note = 2'-fluoroadenosine
  modified_base 10: mod_base = OTHER; note = 2'-fluorouridine
  modified_base 11: mod_base = OTHER; note = 2'-fluoroguanosine
  modified_base 12: mod_base = gm
  modified_base 13: mod_base = gm
  modified_base 14: mod_base = OTHER; note = 2'-O-methyladenosine
  modified_base 15: mod_base = gm
  modified_base 16: mod_base = cm
  modified_base 17: mod_base = um
  modified_base 18: mod_base = um
  modified_base 19: mod_base = OTHER; note = 2'-O-methylguanosine with a 3'-phosphorothioate linkage
  modified_base 20: mod_base = OTHER; note = 2'-O-methyluridine with a 3'-phosphorothioate linkage
  modified_base 21: mod_base = OTHER; note = 2'-O-methyladenosine
ccttggtgatgggagcttgta

SEQ ID NO: 1627 - RNA, 23 nt, synthetic construct
  source 1..23: mol_type = other RNA
  modified_base 1: mod_base = OTHER; note = 2'-O-methyluridine with a 3'-phosphorothioate linkage and a 5'-phosphate substitution
  modified_base 2: mod_base = OTHER; note = 2'-fluoroadenosine with a 3'-phosphorothioate linkage
  modified_base 3: mod_base = cm
  modified_base 4: mod_base = OTHER; note = 2'-O-methyladenosine
  modified_base 5: mod_base = OTHER; note = 2'-fluoroadenosine
  modified_base 6: mod_base = gm
  modified_base 7: mod_base = OTHER; note = 2'-fluorocytidine
  modified_base 8: mod_base = um
  modified_base 9: mod_base = cm
  modified_base 10: mod_base = cm
  modified_base 11: mod_base = cm
  modified_base 12: mod_base = OTHER; note = 2'-O-methyladenosine
  modified_base 13: mod_base = um
  modified_base 14: mod_base = OTHER; note = 2'-fluorocytidine
  modified_base 15: mod_base = OTHER; note = 2'-O-methyladenosine
  modified_base 16: mod_base = OTHER; note = 2'-fluorocytidine
  modified_base 17: mod_base = cm
  modified_base 18: mod_base = OTHER; note = 2'-O-methyladenosine
  modified_base 19: mod_base = OTHER; note = 2'-O-methyladenosine
  modified_base 20: mod_base = gm
  modified_base 21: mod_base = OTHER; note = 2'-O-methylguanosine with a 3'-phosphorothioate linkage
  modified_base 22: mod_base = OTHER; note = 2'-O-methyladenosine with a 3'-phosphorothioate linkage
  modified_base 23: mod_base = gm
tacaagctcccatcaccaaggag

SEQ ID NO: 1628 - RNA, 21 nt, synthetic construct
  source 1..21: mol_type = other RNA
  modified_base 1: mod_base = OTHER; note = 2'-O-methyluridine with a 3'-phosphorothioate linkage
  modified_base 2: mod_base = OTHER; note = 2'-O-methylguanosine with a 3'-phosphorothioate linkage
  modified_base 3: mod_base = gm
  modified_base 4: mod_base = um
  modified_base 5: mod_base = gm
  modified_base 6: mod_base = OTHER; note = 2'-O-methyladenosine
  modified_base 7: mod_base = um
  modified_base 8: mod_base = gm
  modified_base 9: mod_base = OTHER; note = 2'-fluoroguanosine
  modified_base 10: mod_base = OTHER; note = 2'-fluoroguanosine
  modified_base 11: mod_base = OTHER; note = 2'-fluoroadenosine
  modified_base 12: mod_base = gm
  modified_base 13: mod_base = cm
  modified_base 14: mod_base = um
  modified_base 15: mod_base = um
  modified_base 16: mod_base = gm
  modified_base 17: mod_base = um
  modified_base 18: mod_base = um
  modified_base 19: mod_base = OTHER; note = 2'-O-methylguanosine with a 3'-phosphorothioate linkage
  modified_base 20: mod_base = OTHER; note = 2'-O-methyluridine with a 3'-phosphorothioate linkage
  modified_base 21: mod_base = OTHER; note = 2'-O-methyladenosine
tggtgatgggagcttgttgta

SEQ ID NO: 1629 - RNA, 23 nt, synthetic construct
  source 1..23: mol_type = other RNA
  modified_base 1: mod_base = OTHER; note = 2'-O-methyluridine with a 3'-phosphorothioate linkage and a 5'-phosphate substitution
  modified_base 2: mod_base = OTHER; note = 2'-fluoroadenosine with a 3'-phosphorothioate linkage
  modified_base 3: mod_base = cm
  modified_base 4: mod_base = OTHER; note = 2'-O-methyladenosine
  modified_base 5: mod_base = OTHER; note = 2'-fluoroadenosine
  modified_base 6: mod_base = cm
  modified_base 7: mod_base = OTHER; note = 2'-fluoroadenosine
  modified_base 8: mod_base = OTHER; note = 2'-O-methyladenosine
  modified_base 9: mod_base = gm
  modified_base 10: mod_base = cm
  modified_base 11: mod_base = um
  modified_base 12: mod_base = cm
  modified_base 13: mod_base = cm
  modified_base 14: mod_base = OTHER; note = 2'-fluorocytidine
  modified_base 15: mod_base = OTHER; note = 2'-O-methyladenosine
  modified_base 16: mod_base = OTHER; note = 2'-fluorouridine
  modified_base 17: mod_base = cm
  modified_base 18: mod_base = OTHER; note = 2'-O-methyladenosine
  modified_base 19: mod_base = cm
  modified_base 20: mod_base = cm
  modified_base 21: mod_base = OTHER; note = 2'-O-methyladenosine with a 3'-phosphorothioate linkage
  modified_base 22: mod_base = OTHER; note = 2'-O-methyladenosine with a 3'-phosphorothioate linkage
  modified_base 23: mod_base = gm
tacaacaagctcccatcaccaag

SEQ ID NO: 1630 - RNA, 21 nt, synthetic construct
  source 1..21: mol_type = other RNA
  modified_base 1: mod_base = OTHER; note = 2'-O-methyluridine with a 3'-phosphorothioate linkage
  modified_base 2: mod_base = OTHER; note = 2'-O-methyladenosine with a 3'-phosphorothioate linkage
  modified_base 3: mod_base = um
  modified_base 4: mod_base = um
  modified_base 5: mod_base = gm
  modified_base 6: mod_base = gm
  modified_base 7: mod_base = OTHER; note = 2'-O-methyladenosine
  modified_base 8: mod_base = um
  modified_base 9: mod_base = OTHER; note = 2'-fluoroadenosine
  modified_base 10: mod_base = OTHER; note = 2'-fluorouridine
  modified_base 11: mod_base = OTHER; note = 2'-fluoroadenosine
  modified_base 12: mod_base = um
  modified_base 13: mod_base = gm
  modified_base 14: mod_base = cm
  modified_base 15: mod_base = cm
  modified_base 16: mod_base = cm
  modified_base 17: mod_base = OTHER; note = 2'-O-methyladenosine
  modified_base 18: mod_base = um
  modified_base 19: mod_base = OTHER; note = 2'-O-methylcytidine with a 3'-phosphorothioate linkage
  modified_base 20: mod_base = OTHER; note = 2'-O-methylcytidine with a 3'-phosphorothioate linkage
  modified_base 21: mod_base = OTHER; note = 2'-O-methyladenosine
tattggatatatgcccatcca

SEQ ID NO: 1631 - RNA, 23 nt, synthetic construct
  source 1..23: mol_type = other RNA
  modified_base 1: mod_base = OTHER; note = 2'-O-methyluridine with a 3'-phosphorothioate linkage and a 5'-phosphate substitution
  modified_base 2: mod_base = OTHER; note = 2'-fluoroguanosine with a 3'-phosphorothioate linkage
  modified_base 3: mod_base = gm
  modified_base 4: mod_base = OTHER; note = 2'-O-methyladenosine
  modified_base 5: mod_base = OTHER; note = 2'-fluorouridine
  modified_base 6: mod_base = gm
  modified_base 7: mod_base = OTHER; note = 2'-fluoroguanosine
  modified_base 8: mod_base = gm
  modified_base 9: mod_base = cm
  modified_base 10: mod_base = OTHER; note = 2'-O-methyladenosine
  modified_base 11: mod_base = um
  modified_base 12: mod_base = OTHER; note = 2'-O-methyladenosine
  modified_base 13: mod_base = um
  modified_base 14: mod_base = OTHER; note = 2'-fluoroadenosine
  modified_base 15: mod_base = um
  modified_base 16: mod_base = OTHER; note = 2'-fluorocytidine
  modified_base 17: mod_base = cm
  modified_base 18: mod_base = OTHER; note = 2'-O-methyladenosine
  modified_base 19: mod_base = OTHER; note = 2'-O-methyladenosine
  modified_base 20: mod_base = um
  modified_base 21: mod_base = OTHER; note = 2'-O-methyladenosine with a 3'-phosphorothioate linkage
  modified_base 22: mod_base = OTHER; note = 2'-O-methyladenosine with a 3'-phosphorothioate linkage
  modified_base 23: mod_base = cm
tggatgggcatatatccaataac

SEQ ID NO: 1632 - RNA, 21 nt, synthetic construct
  source 1..21: mol_type = other RNA
  modified_base 1: mod_base = OTHER; note = 2'-O-methyladenosine with a 3'-phosphorothioate linkage
  modified_base 2: mod_base = OTHER; note = 2'-O-methyluridine with a 3'-phosphorothioate linkage
  modified_base 3: mod_base = um
  modified_base 4: mod_base = gm
  modified_base 5: mod_base = gm
  modified_base 6: mod_base = OTHER; note = 2'-O-methyladenosine
  modified_base 7: mod_base = um
  modified_base 8: mod_base = OTHER; note = 2'-O-methyladenosine
  modified_base 9: mod_base = OTHER; note = 2'-fluorouridine
  modified_base 10: mod_base = OTHER; note = 2'-fluoroadenosine
  modified_base 11: mod_base = OTHER; note = 2'-fluorouridine
  modified_base 12: mod_base = gm
  modified_base 13: mod_base = cm
  modified_base 14: mod_base = cm
  modified_base 15: mod_base = cm
  modified_base 16: mod_base = OTHER; note = 2'-O-methyladenosine
  modified_base 17: mod_base = um
  modified_base 18: mod_base = cm
  modified_base 19: mod_base = OTHER; note = 2'-O-methylcytidine with a 3'-phosphorothioate linkage
  modified_base 20: mod_base = OTHER; note = 2'-O-methylcytidine with a 3'-phosphorothioate linkage
  modified_base 21: mod_base = OTHER; note = 2'-O-methyladenosine
attggatatatgcccatccca

SEQ ID NO: 1633 - RNA, 23 nt, synthetic construct
  source 1..23: mol_type = other RNA
  modified_base 1: mod_base = OTHER; note = 2'-O-methyluridine with a 3'-phosphorothioate linkage and a 5'-phosphate substitution
  modified_base 2: mod_base = OTHER; note = 2'-fluoroguanosine with a 3'-phosphorothioate linkage
  modified_base 3: mod_base = gm
  modified_base 4: mod_base = gm
  modified_base 5: mod_base = OTHER; note = 2'-fluoroadenosine
  modified_base 6: mod_base = um
  modified_base 7: mod_base = OTHER; note = 2'-fluoroguanosine
  modified_base 8: mod_base = gm
  modified_base 9: mod_base = gm
  modified_base 10: mod_base = cm
  modified_base 11: mod_base = OTHER; note = 2'-O-methyladenosine
  modified_base 12: mod_base = um
  modified_base 13: mod_base = OTHER; note = 2'-O-methyladenosine
  modified_base 14: mod_base = OTHER; note = 2'-fluorouridine
  modified_base 15: mod_base = OTHER; note = 2'-O-methyladenosine
  modified_base 16: mod_base = OTHER; note = 2'-fluorouridine
  modified_base 17: mod_base = cm
  modified_base 18: mod_base = cm
  modified_base 19: mod_base = OTHER; note = 2'-O-methyladenosine
  modified_base 20: mod_base = OTHER; note = 2'-O-methyladenosine
  modified_base 21: mod_base = OTHER; note = 2'-O-methyluridine with a 3'-phosphorothioate linkage
  modified_base 22: mod_base = OTHER; note = 2'-O-methyladenosine with a 3'-phosphorothioate linkage
  modified_base 23: mod_base = OTHER; note = 2'-O-methyladenosine
tgggatgggcatatatccaataa

SEQ ID NO: 1634 - RNA, 21 nt, synthetic construct
  source 1..21: mol_type = other RNA
  modified_base 1: mod_base = OTHER; note = 2'-O-methylcytidine with a 3'-phosphorothioate linkage
  modified_base 2: mod_base = OTHER; note = 2'-O-methyladenosine with a 3'-phosphorothioate linkage
  modified_base 3: mod_base = gm
  modified_base 4: mod_base = OTHER; note = 2'-O-methyladenosine
  modified_base 5: mod_base = OTHER; note = 2'-O-methyladenosine
  modified_base 6: mod_base = gm
  modified_base 7: mod_base = gm
  modified_base 8: mod_base = um
  modified_base 9: mod_base = OTHER; note = 2'-fluorouridine
  modified_base 10: mod_base = OTHER; note = 2'-fluoroguanosine
  modified_base 11: mod_base = OTHER; note = 2'-fluorouridine
  modified_base 12: mod_base = cm
  modified_base 13: mod_base = um
  modified_base 14: mod_base = um
  modified_base 15: mod_base = gm
  modified_base 16: mod_base = um
  modified_base 17: mod_base = gm
  modified_base 18: mod_base = gm
  modified_base 19: mod_base = OTHER; note = 2'-O-methylcytidine with a 3'-phosphorothioate linkage
  modified_base 20: mod_base = OTHER; note = 2'-O-methylcytidine with a 3'-phosphorothioate linkage
  modified_base 21: mod_base = OTHER; note = 2'-O-methyladenosine
cagaaggttgtcttgtggcca

SEQ ID NO: 1635 - RNA, 23 nt, synthetic construct
  source 1..23: mol_type = other RNA
  modified_base 1: mod_base = OTHER; note = 2'-O-methyluridine with a 3'-phosphorothioate linkage and a 5'-phosphate substitution
  modified_base 2: mod_base = OTHER; note = 2'-fluoroguanosine with a 3'-phosphorothioate linkage
  modified_base 3: mod_base = gm
  modified_base 4: mod_base = cm
  modified_base 5: mod_base = OTHER; note = 2'-fluorocytidine
  modified_base 6: mod_base = OTHER; note = 2'-O-methyladenosine
  modified_base 7: mod_base = OTHER; note = 2'-fluorocytidine
  modified_base 8: mod_base = OTHER; note = 2'-O-methyladenosine
  modified_base 9: mod_base = OTHER; note = 2'-O-methyladenosine
  modified_base 10: mod_base = gm
  modified_base 11: mod_base = OTHER; note = 2'-O-methyladenosine
  modified_base 12: mod_base = cm
  modified_base 13: mod_base = OTHER; note = 2'-O-methyladenosine
  modified_base 14: mod_base = OTHER; note = 2'-fluoroadenosine
  modified_base 15: mod_base = cm
  modified_base 16: mod_base = OTHER; note = 2'-fluorocytidine
  modified_base 17: mod_base = um
  modified_base 18: mod_base = um
  modified_base 19: mod_base = cm
  modified_base 20: mod_base = um
  modified_base 21: mod_base = OTHER; note = 2'-O-methylguanosine with a 3'-phosphorothioate linkage
  modified_base 22: mod_base = OTHER; note = 2'-O-methyluridine with a 3'-phosphorothioate linkage
  modified_base 23: mod_base = um
tggccacaagacaaccttctgtt

SEQ ID NO: 1636 - RNA, 21 nt, synthetic construct
  source 1..21: mol_type = other RNA
  modified_base 1: mod_base = OTHER; note = 2'-O-methyladenosine with a 3'-phosphorothioate linkage
  modified_base 2: mod_base = OTHER; note = 2'-O-methylguanosine with a 3'-phosphorothioate linkage
  modified_base 3: mod_base = gm
  modified_base 4: mod_base = um
  modified_base 5: mod_base = um
  modified_base 6: mod_base = gm
  modified_base 7: mod_base = um
  modified_base 8: mod_base = cm
  modified_base 9: mod_base = OTHER; note = 2'-fluorouridine
  modified_base 10: mod_base = OTHER; note = 2'-fluorouridine
  modified_base 11: mod_base = OTHER; note = 2'-fluoroguanosine
  modified_base 12: mod_base = um
  modified_base 13: mod_base = gm
  modified_base 14: mod_base = gm
  modified_base 15: mod_base = cm
  modified_base 16: mod_base = cm
  modified_base 17: mod_base = OTHER; note = 2'-O-methyladenosine
  modified_base 18: mod_base = gm
  modified_base 19: mod_base = OTHER; note = 2'-O-methylcytidine with a 3'-phosphorothioate linkage
  modified_base 20: mod_base = OTHER; note = 2'-O-methyladenosine with a 3'-phosphorothioate linkage
  modified_base 21: mod_base = OTHER; note = 2'-O-methyladenosine
aggttgtcttgtggccagcaa

SEQ ID NO: 1637 - RNA, 23 nt, synthetic construct
  source 1..23: mol_type = other RNA
  modified_base 1: mod_base = OTHER; note = 2'-O-methyluridine with a 3'-phosphorothioate linkage and a 5'-phosphate substitution
  modified_base 2: mod_base = OTHER; note = 2'-fluorouridine with a 3'-phosphorothioate linkage
  modified_base 3: mod_base = gm
  modified_base 4: mod_base = cm
  modified_base 5: mod_base = OTHER; note = 2'-fluorouridine
  modified_base 6: mod_base = gm
  modified_base 7: mod_base = OTHER; note = 2'-fluoroguanosine
  modified_base 8: mod_base = cm
  modified_base 9: mod_base = cm
  modified_base 10: mod_base = OTHER; note = 2'-O-methyladenosine
  modified_base 11: mod_base = cm
  modified_base 12: mod_base = OTHER; note = 2'-O-methyladenosine
  modified_base 13: mod_base = OTHER; note = 2'-O-methyladenosine
  modified_base 14: mod_base = OTHER; note = 2'-fluoroguanosine
  modified_base 15: mod_base = OTHER; note = 2'-O-methyladenosine
  modified_base 16: mod_base = OTHER; note = 2'-fluorocytidine
  modified_base 17: mod_base = OTHER; note = 2'-O-methyladenosine
  modified_base 18: mod_base = OTHER; note = 2'-O-methyladenosine
  modified_base 19: mod_base = cm
  modified_base 20: mod_base = cm
  modified_base 21: mod_base = OTHER; note = 2'-O-methyluridine with a 3'-phosphorothioate linkage
  modified_base 22: mod_base = OTHER; note = 2'-O-methyluridine with a 3'-phosphorothioate linkage
  modified_base 23: mod_base = cm
ttgctggccacaagacaaccttc

SEQ ID NO: 1638 - RNA, 21 nt, synthetic construct
  source 1..21: mol_type = other RNA
  modified_base 1: mod_base = OTHER; note = 2'-O-methyluridine with a 3'-phosphorothioate linkage
  modified_base 2: mod_base = OTHER; note = 2'-O-methyluridine with a 3'-phosphorothioate linkage
  modified_base 3: mod_base = gm
  modified_base 4: mod_base = um
  modified_base 5: mod_base = cm
  modified_base 6: mod_base = um
  modified_base 7: mod_base = um
  modified_base 8: mod_base = gm
  modified_base 9: mod_base = OTHER; note = 2'-fluorouridine
  modified_base 10: mod_base = OTHER; note = 2'-fluoroguanosine
  modified_base 11: mod_base = OTHER; note = 2'-fluoroguanosine
  modified_base 12: mod_base = cm
  modified_base 13: mod_base = cm
  modified_base 14: mod_base = OTHER; note = 2'-O-methyladenosine
  modified_base 15: mod_base = gm
  modified_base 16: mod_base = cm
  modified_base 17: mod_base = OTHER; note = 2'-O-methyladenosine
  modified_base 18: mod_base = cm
  modified_base 19: mod_base = OTHER; note = 2'-O-methylcytidine with a 3'-phosphorothioate linkage
  modified_base 20: mod_base = OTHER; note = 2'-O-methyladenosine with a 3'-phosphorothioate linkage
  modified_base 21: mod_base = OTHER; note = 2'-O-methyladenosine
ttgtcttgtggccagcaccaa

SEQ ID NO: 1639 - RNA, 23 nt, synthetic construct
  source 1..23: mol_type = other RNA
  modified_base 1: mod_base = OTHER; note = 2'-O-methyluridine with a 3'-phosphorothioate linkage and a 5'-phosphate substitution
  modified_base 2: mod_base = OTHER; note = 2'-fluorouridine with a 3'-phosphorothioate linkage
  modified_base 3: mod_base = gm
  modified_base 4: mod_base = gm
  modified_base 5: mod_base = OTHER; note = 2'-fluorouridine
  modified_base 6: mod_base = gm
  modified_base 7: mod_base = OTHER; note = 2'-fluorocytidine
  modified_base 8: mod_base = um
  modified_base 9: mod_base = gm
  modified_base 10: mod_base = gm
  modified_base 11: mod_base = cm
  modified_base 12: mod_base = cm
  modified_base 13: mod_base = OTHER; note = 2'-O-methyladenosine
  modified_base 14: mod_base = OTHER; note = 2'-fluorocytidine
  modified_base 15: mod_base = OTHER; note = 2'-O-methyladenosine
  modified_base 16: mod_base = OTHER; note = 2'-fluoroadenosine
  modified_base 17: mod_base = gm
  modified_base 18: mod_base = OTHER; note = 2'-O-methyladenosine
  modified_base 19: mod_base = cm
  modified_base 20: mod_base = OTHER; note = 2'-O-methyladenosine
  modified_base 21: mod_base = OTHER; note = 2'-O-methyladenosine with a 3'-phosphorothioate linkage
  modified_base 22: mod_base = OTHER; note = 2'-O-methylcytidine with a 3'-phosphorothioate linkage
  modified_base 23: mod_base = cm
ttggtgctggccacaagacaacc

SEQ ID NO: 1640 - RNA, 21 nt, synthetic construct
  source 1..21: mol_type = other RNA
  modified_base 1: mod_base = OTHER; note = 2'-O-methyluridine with a 3'-phosphorothioate linkage
  modified_base 2: mod_base = OTHER; note = 2'-O-methylguanosine with a 3'-phosphorothioate linkage
  modified_base 3: mod_base = um
  modified_base 4: mod_base = cm
  modified_base 5: mod_base = um
  modified_base 6: mod_base = um
  modified_base 7: mod_base = gm
  modified_base 8: mod_base = um
  modified_base 9: mod_base = OTHER; note = 2'-fluoroguanosine
  modified_base 10: mod_base = OTHER; note = 2'-fluoroguanosine
  modified_base 11: mod_base = OTHER; note = 2'-fluorocytidine
  modified_base 12: mod_base = cm
  modified_base 13: mod_base = OTHER; note = 2'-O-methyladenosine
  modified_base 14: mod_base = gm
  modified_base 15: mod_base = cm
  modified_base 16: mod_base = OTHER; note = 2'-O-methyladenosine
  modified_base 17: mod_base = cm
  modified_base 18: mod_base = cm
  modified_base 19: mod_base = OTHER; note = 2'-O-methyladenosine with a 3'-phosphorothioate linkage
  modified_base 20: mod_base = OTHER; note = 2'-O-methyladenosine with a 3'-phosphorothioate linkage
  modified_base 21: mod_base = OTHER; note = 2'-O-methyladenosine
tgtcttgtggccagcaccaaa

SEQ ID NO: 1641 - RNA, 23 nt, synthetic construct
  source 1..23: mol_type = other RNA
  modified_base 1: mod_base = OTHER; note = 2'-O-methyluridine with a 3'-phosphorothioate linkage and a 5'-phosphate substitution
  modified_base 2: mod_base = OTHER; note = 2'-fluorouridine with a 3'-phosphorothioate linkage
  modified_base 3: mod_base = um
  modified_base 4: mod_base = gm
  modified_base 5: mod_base = OTHER; note = 2'-fluoroguanosine
  modified_base 6: mod_base = um
  modified_base 7: mod_base = OTHER; note = 2'-fluoroguanosine
  modified_base 8: mod_base = cm
  modified_base 9: mod_base = um
  modified_base 10: mod_base = gm
  modified_base 11: mod_base = gm
  modified_base 12: mod_base = cm
  modified_base 13: mod_base = cm
  modified_base 14: mod_base = OTHER; note = 2'-fluoroadenosine
  modified_base 15: mod_base = cm
  modified_base 16: mod_base = OTHER; note = 2'-fluoroadenosine
  modified_base 17: mod_base = OTHER; note = 2'-O-methyladenosine
  modified_base 18: mod_base = gm
  modified_base 19: mod_base = OTHER; note = 2'-O-methyladenosine
  modified_base 20: mod_base = cm
  modified_base 21: mod_base = OTHER; note = 2'-O-methyladenosine with a 3'-phosphorothioate linkage
  modified_base 22: mod_base = OTHER; note = 2'-O-methyladenosine with a 3'-phosphorothioate linkage
  modified_base 23: mod_base = cm
tttggtgctggccacaagacaac

SEQ ID NO: 1642 - RNA, 21 nt, synthetic construct
  source 1..21: mol_type = other RNA
  modified_base 1: mod_base = OTHER; note = 2'-O-methyladenosine with a 3'-phosphorothioate linkage
  modified_base 2: mod_base = OTHER; note = 2'-O-methylguanosine with a 3'-phosphorothioate linkage
  modified_base 3: mod_base = gm
  modified_base 4: mod_base = um
  modified_base 5: mod_base = cm
  modified_base 6: mod_base = um
  modified_base 7: mod_base = um
  modified_base 8: mod_base = gm
  modified_base 9: mod_base = OTHER; note = 2'-fluoroguanosine
  modified_base 10: mod_base = OTHER; note = 2'-fluorouridine
  modified_base 11: mod_base = OTHER; note = 2'-fluoroguanosine
  modified_base 12: mod_base = gm
  modified_base 13: mod_base = OTHER; note = 2'-O-methyladenosine
  modified_base 14: mod_base = gm
  modified_base 15: mod_base = gm
  modified_base 16: mod_base = um
  modified_base 17: mod_base = gm
  modified_base 18: mod_base = cm
  modified_base 19: mod_base = OTHER; note = 2'-O-methylcytidine with a 3'-phosphorothioate linkage
  modified_base 20: mod_base = OTHER; note = 2'-O-methyladenosine with a 3'-phosphorothioate linkage
  modified_base 21: mod_base = OTHER; note = 2'-O-methyladenosine
aggtcttggtggaggtgccaa

SEQ ID NO: 1643 - RNA, 23 nt, synthetic construct
  source 1..23: mol_type = other RNA
  modified_base 1: mod_base = OTHER; note = 2'-O-methyluridine with a 3'-phosphorothioate linkage and a 5'-phosphate substitution
  modified_base 2: mod_base = OTHER; note = 2'-fluorouridine with a 3'-phosphorothioate linkage
  modified_base 3: mod_base = gm
  modified_base 4: mod_base = gm
  modified_base 5: mod_base = OTHER; note = 2'-fluorocytidine
  modified_base 6: mod_base = OTHER; note = 2'-O-methyladenosine
  modified_base 7: mod_base = OTHER; note = 2'-fluorocytidine
  modified_base 8: mod_base = cm
  modified_base 9: mod_base = um
  modified_base 10: mod_base = cm
  modified_base 11: mod_base = cm
  modified_base 12: mod_base = OTHER; note = 2'-O-methyladenosine
  modified_base 13: mod_base = cm
  modified_base 14: mod_base = OTHER; note = 2'-fluorocytidine
  modified_base 15: mod_base = OTHER; note = 2'-O-methyladenosine
  modified_base 16: mod_base = OTHER; note = 2'-fluoroadenosine
  modified_base 17: mod_base = gm
  modified_base 18: mod_base = OTHER; note = 2'-O-methyladenosine
  modified_base 19: mod_base = cm
  modified_base 20: mod_base = cm
  modified_base 21: mod_base = OTHER; note = 2'-O-methyluridine with a 3'-phosphorothioate linkage
  modified_base 22: mod_base = OTHER; note = 2'-O-methyladenosine with a 3'-phosphorothioate linkage
  modified_base 23: mod_base = um
ttggcacctccaccaagacctat

SEQ ID NO: 1644 - RNA, 21 nt, synthetic construct
  source 1..21: mol_type = other RNA
  modified_base 1: mod_base = OTHER; note = 2'-O-methylguanosine with a 3'-phosphorothioate linkage
  modified_base 2: mod_base = OTHER; note = 2'-O-methylguanosine with a 3'-phosphorothioate linkage
  modified_base 3: mod_base = um
  modified_base 4: mod_base = cm
  modified_base 5: mod_base = um
  modified_base 6: mod_base = um
  modified_base 7: mod_base = gm
  modified_base 8: mod_base = gm
  modified_base 9: mod_base = OTHER; note = 2'-fluorouridine
  modified_base 10: mod_base = OTHER; note = 2'-fluoroguanosine
  modified_base 11: mod_base = OTHER; note = 2'-fluoroguanosine
  modified_base 12: mod_base = OTHER; note = 2'-O-methyladenosine
  modified_base 13: mod_base = gm
  modified_base 14: mod_base = gm
  modified_base 15: mod_base = um
  modified_base 16: mod_base = gm
  modified_base 17: mod_base = cm
  modified_base 18: mod_base = cm
  modified_base 19: mod_base = OTHER; note = 2'-O-methyladenosine with a 3'-phosphorothioate linkage
  modified_base 20: mod_base = OTHER; note = 2'-O-methylguanosine with a 3'-phosphorothioate linkage
  modified_base 21: mod_base = OTHER; note = 2'-O-methyladenosine
ggtcttggtggaggtgccaga

SEQ ID NO: 1645 - RNA, 23 nt, synthetic construct
  source 1..23: mol_type = other RNA
  modified_base 1: mod_base = OTHER; note = 2'-O-methyluridine with a 3'-phosphorothioate linkage and a 5'-phosphate substitution
  modified_base 2: mod_base = OTHER; note = 2'-fluorocytidine with a 3'-phosphorothioate linkage
  modified_base 3: mod_base = um
  modified_base 4: mod_base = gm
  modified_base 5: mod_base = OTHER; note = 2'-fluoroguanosine
  modified_base 6: mod_base = cm
  modified_base 7: mod_base = OTHER; note = 2'-fluoroadenosine
  modified_base 8: mod_base = cm
  modified_base 9: mod_base = cm
  modified_base 10: mod_base = um
  modified_base 11: mod_base = cm
  modified_base 12: mod_base = cm
  modified_base 13: mod_base = OTHER; note = 2'-O-methyladenosine
  modified_base 14: mod_base = OTHER; note = 2'-fluorocytidine
  modified_base 15: mod_base = cm
  modified_base 16: mod_base = OTHER; note = 2'-fluoroadenosine
  modified_base 17: mod_base = OTHER; note = 2'-O-methyladenosine
  modified_base 18: mod_base = gm
  modified_base 19: mod_base = OTHER; note = 2'-O-methyladenosine
  modified_base 20: mod_base = cm
  modified_base 21: mod_base = OTHER; note = 2'-O-methylcytidine with a 3'-phosphorothioate linkage
  modified_base 22: mod_base = OTHER; note = 2'-O-methyluridine with a 3'-phosphorothioate linkage
  modified_base 23: mod_base = OTHER; note = 2'-O-methyladenosine
tctggcacctccaccaagaccta

SEQ ID NO: 1646 - RNA, 21 nt, synthetic construct
  source 1..21: mol_type = other RNA
  modified_base 1: mod_base = OTHER; note = 2'-O-methylguanosine with a 3'-phosphorothioate linkage
  modified_base 2: mod_base = OTHER; note = 2'-O-methyluridine with a 3'-phosphorothioate linkage
  modified_base 3: mod_base = gm
  modified_base 4: mod_base = gm
  modified_base 5: mod_base = OTHER; note = 2'-O-methyladenosine
  modified_base 6: mod_base = gm
  modified_base 7: mod_base = gm
  modified_base 8: mod_base = um
  modified_base 9: mod_base = OTHER; note = 2'-fluoroguanosine
  modified_base 10: mod_base = OTHER; note = 2'-fluorocytidine
  modified_base 11: mod_base = OTHER; note = 2'-fluorocytidine
  modified_base 12: mod_base = OTHER; note = 2'-O-methyladenosine
  modified_base 13: mod_base = gm
  modified_base 14: mod_base = cm
  modified_base 15: mod_base = OTHER; note = 2'-O-methyladenosine
  modified_base 16: mod_base = gm
  modified_base 17: mod_base = cm
  modified_base 18: mod_base = cm
  modified_base 19: mod_base = OTHER; note = 2'-O-methylguanosine with a 3'-phosphorothioate linkage
  modified_base 20: mod_base = OTHER; note = 2'-O-methyladenosine with a 3'-phosphorothioate linkage
  modified_base 21: mod_base = OTHER; note = 2'-O-methyladenosine
gtggaggtgccagcagccgaa

SEQ ID NO: 1647 - RNA, 23 nt, synthetic construct
  source 1..23: mol_type = other RNA
  modified_base 1: mod_base = OTHER; note = 2'-O-methyluridine with a 3'-phosphorothioate linkage and a 5'-phosphate substitution
  modified_base 2: mod_base = OTHER; note = 2'-fluorouridine with a 3'-phosphorothioate linkage
  modified_base 3: mod_base = cm
  modified_base 4: mod_base = gm
  modified_base 5: mod_base = OTHER; note = 2'-fluoroguanosine
  modified_base 6: mod_base = cm
  modified_base 7: mod_base = OTHER; note = 2'-fluorouridine
  modified_base 8: mod_base = gm
  modified_base 9: mod_base = cm
  modified_base 10: mod_base = um
  modified_base 11: mod_base = gm
  modified_base 12: mod_base = gm
  modified_base 13: mod_base = cm
  modified_base 14: mod_base = OTHER; note = 2'-fluoroadenosine
  modified_base 15: mod_base = cm
  modified_base 16: mod_base = OTHER; note = 2'-fluorocytidine
  modified_base 17: mod_base = um
  modified_base 18: mod_base = cm
  modified_base 19: mod_base = cm
  modified_base 20: mod_base = OTHER; note = 2'-O-methyladenosine
  modified_base 21: mod_base = OTHER; note = 2'-O-methylcytidine with a 3'-phosphorothioate linkage
  modified_base 22: mod_base = OTHER; note = 2'-O-methylcytidine with a 3'-phosphorothioate linkage
  modified_base 23: mod_base = OTHER; note = 2'-O-methyladenosine
ttcggctgctggcacctccacca

SEQ ID NO: 1648 - RNA, 21 nt, synthetic construct
  source 1..21: mol_type = other RNA
  modified_base 1: mod_base = OTHER; note = 2'-O-methylguanosine with a 3'-phosphorothioate linkage
  modified_base 2: mod_base = OTHER; note = 2'-O-methyluridine with a 3'-phosphorothioate linkage
  modified_base 3: mod_base = gm
  modified_base 4: mod_base = cm
  modified_base 5: mod_base = cm
  modified_base 6: mod_base = OTHER; note = 2'-O-methyladenosine
  modified_base 7: mod_base = gm
  modified_base 8: mod_base = cm
  modified_base 9: mod_base = OTHER; note = 2'-fluoroadenosine
  modified_base 10: mod_base = OTHER; note = 2'-fluoroguanosine
  modified_base 11: mod_base = OTHER; note = 2'-fluorocytidine
  modified_base 12: mod_base = cm
  modified_base 13: mod_base = gm
  modified_base 14: mod_base = OTHER; note = 2'-O-methyladenosine
  modified_base 15: mod_base = gm
  modified_base 16: mod_base = um
  modified_base 17: mod_base = cm
  modified_base 18: mod_base = cm
  modified_base 19: mod_base = OTHER; note = 2'-O-methyluridine with a 3'-phosphorothioate linkage
  modified_base 20: mod_base = OTHER; note = 2'-O-methyluridine with a 3'-phosphorothioate linkage
  modified_base 21: mod_base = OTHER; note = 2'-O-methyladenosine
gtgccagcagccgagtcctta

SEQ ID NO: 1649 - RNA, 23 nt, synthetic construct
  source 1..23: mol_type = other RNA
  modified_base 1: mod_base = OTHER; note = 2'-O-methyluridine with a 3'-phosphorothioate linkage and a 5'-phosphate substitution
  modified_base 2: mod_base = OTHER; note = 2'-fluoroadenosine with a 3'-phosphorothioate linkage
  modified_base 3: mod_base = OTHER; note = 2'-O-methyladenosine
  modified_base 4: mod_base = gm
  modified_base 5: mod_base = OTHER; note = 2'-fluoroguanosine
  modified_base 6: mod_base = OTHER; note = 2'-O-methyladenosine
  modified_base 7: mod_base = OTHER; note = 2'-fluorocytidine
  modified_base 8: mod_base = um
  modified_base 9: mod_base = cm
  modified_base 10: mod_base = gm
  modified_base 11: mod_base = gm
  modified_base 12: mod_base = cm
  modified_base 13: mod_base = um
  modified_base 14: mod_base = OTHER; note = 2'-fluoroguanosine
  modified_base 15: mod_base = cm
  modified_base 16: mod_base = OTHER; note = 2'-fluorouridine
  modified_base 17: mod_base = gm
  modified_base 18: mod_base = gm
  modified_base 19: mod_base = cm
  modified_base 20: mod_base = OTHER; note = 2'-O-methyladenosine
  modified_base 21: mod_base = OTHER; note = 2'-O-methylcytidine with a 3'-phosphorothioate linkage
  modified_base 22: mod_base = OTHER; note = 2'-O-methylcytidine with a 3'-phosphorothioate linkage
  modified_base 23: mod_base = um
taaggactcggctgctggcacct

SEQ ID NO: 1650 - RNA, 21 nt, synthetic construct
  source 1..21: mol_type = other RNA
  modified_base 1: mod_base = OTHER; note = 2'-O-methylcytidine with a 3'-phosphorothioate linkage
  modified_base 2: mod_base = OTHER; note = 2'-O-methyladenosine with a 3'-phosphorothioate linkage
  modified_base 3: mod_base = gm
  modified_base 4: mod_base = cm
  modified_base 5: mod_base = OTHER; note = 2'-O-methyladenosine
  modified_base 6: mod_base = gm
  modified_base 7: mod_base = cm
  modified_base 8: mod_base = cm
  modified_base 9: mod_base = OTHER; note = 2'-fluoroguanosine
  modified_base 10: mod_base = OTHER; note = 2'-fluoroadenosine
  modified_base 11: mod_base = OTHER; note = 2'-fluoroguanosine
  modified_base 12: mod_base = um
  modified_base 13: mod_base = cm
  modified_base 14: mod_base = cm
  modified_base 15: mod_base = um
  modified_base 16: mod_base = um
  modified_base 17: mod_base = gm
  modified_base 18: mod_base = cm
  modified_base 19: mod_base = OTHER; note = 2'-O-methyladenosine with a 3'-phosphorothioate linkage
  modified_base 20: mod_base = OTHER; note = 2'-O-methylguanosine with a 3'-phosphorothioate linkage
  modified_base 21: mod_base = OTHER; note = 2'-O-methyladenosine
cagcagccgagtccttgcaga

SEQ ID NO: 1651 - RNA, 23 nt, synthetic construct
  source 1..23: mol_type = other RNA
  modified_base 1: mod_base = OTHER; note = 2'-O-methyluridine with a 3'-phosphorothioate linkage and a 5'-phosphate substitution
  modified_base 2: mod_base = OTHER; note = 2'-fluorocytidine with a 3'-phosphorothioate linkage
  modified_base 3: mod_base = um
  modified_base 4: mod_base = gm
  modified_base 5: mod_base = OTHER; note = 2'-fluorocytidine
  modified_base 6: mod_base = OTHER; note = 2'-O-methyladenosine
  modified_base 7: mod_base = OTHER; note = 2'-fluoroadenosine
  modified_base 8: mod_base = gm
  modified_base 9: mod_base = gm
  modified_base 10: mod_base = OTHER; note = 2'-O-methyladenosine
  modified_base 11: mod_base = cm
  modified_base 12: mod_base = um
  modified_base 13: mod_base = cm
  modified_base 14: mod_base = OTHER; note = 2'-fluoroguanosine
  modified_base 15: mod_base = gm
  modified_base 16: mod_base = OTHER; note = 2'-fluorocytidine
  modified_base 17: mod_base = um
  modified_base 18: mod_base = gm
  modified_base 19: mod_base = cm
  modified_base 20: mod_base = um
  modified_base 21: mod_base = OTHER; note = 2'-O-methylguanosine with a 3'-phosphorothioate linkage
  modified_base 22: mod_base = OTHER; note = 2'-O-methylguanosine with a 3'-phosphorothioate linkage
  modified_base 23: mod_base = cm
tctgcaaggactcggctgctggc

SEQ ID NO: 1652 - RNA, 21 nt, synthetic construct
  source 1..21: mol_type = other RNA
  modified_base 1: mod_base = OTHER; note = 2'-O-methyladenosine with a 3'-phosphorothioate linkage
  modified_base 2: mod_base = OTHER; note = 2'-O-methylguanosine with a 3'-phosphorothioate linkage
  modified_base 3: mod_base = cm
  modified_base 4: mod_base = OTHER; note = 2'-O-methyladenosine
  modified_base 5: mod_base = gm
  modified_base 6: mod_base = cm
  modified_base 7: mod_base = cm
  modified_base 8: mod_base = gm
  modified_base 9: mod_base = OTHER; note = 2'-fluoroadenosine
  modified_base 10: mod_base = OTHER; note = 2'-fluoroguanosine
  modified_base 11: mod_base = OTHER; note = 2'-fluorouridine
  modified_base 12: mod_base = cm
  modified_base 13: mod_base = cm
  modified_base 14: mod_base = um
  modified_base 15: mod_base = um
  modified_base 16: mod_base = gm
  modified_base 17: mod_base = cm
  modified_base 18: mod_base = OTHER; note = 2'-O-methyladenosine
  modified_base 19: mod_base = OTHER; note = 2'-O-methylguanosine with a 3'-phosphorothioate linkage
  modified_base 20: mod_base = OTHER; note = 2'-O-methyladenosine with a 3'-phosphorothioate linkage
  modified_base 21: mod_base = OTHER; note = 2'-O-methyladenosine
agcagccgagtccttgcagaa

SEQ ID NO: 1653 - RNA, 23 nt, synthetic construct
  source 1..23: mol_type = other RNA
  modified_base 1: mod_base = OTHER; note = 2'-O-methyluridine with a 3'-phosphorothioate linkage and a 5'-phosphate substitution
  modified_base 2: mod_base = OTHER; note = 2'-fluorouridine with a 3'-phosphorothioate linkage
  modified_base 3: mod_base = cm
  modified_base 4: mod_base = um
  modified_base 5: mod_base = OTHER; note = 2'-fluoroguanosine
  modified_base 6: mod_base = cm
  modified_base 7: mod_base = OTHER; note = 2'-fluoroadenosine
  modified_base 8: mod_base = OTHER; note = 2'-O-methyladenosine
  modified_base 9: mod_base = gm
  modified_base 10: mod_base = gm
  modified_base 11: mod_base = OTHER; note = 2'-O-methyladenosine
  modified_base 12: mod_base = cm
  modified_base 13: mod_base = um
  modified_base 14: mod_base = OTHER; note = 2'-fluorocytidine
  modified_base 15: mod_base = gm
  modified_base 16: mod_base = OTHER; note = 2'-fluoroguanosine
  modified_base 17: mod_base = cm
  modified_base 18: mod_base = um
  modified_base 19: mod_base = gm
  modified_base 20: mod_base = cm
  modified_base 21: mod_base = OTHER; note = 2'-O-methyluridine with a 3'-phosphorothioate linkage
  modified_base 22: mod_base = OTHER; note = 2'-O-methylguanosine with a 3'-phosphorothioate linkage
  modified_base 23: mod_base = gm
ttctgcaaggactcggctgctgg

SEQ ID NO: 1654 - RNA, 21 nt, synthetic construct
  source 1..21: mol_type = other RNA
  modified_base 1: mod_base = OTHER; note = 2'-O-methylguanosine with a 3'-phosphorothioate linkage
  modified_base 2: mod_base = OTHER; note = 2'-O-methylcytidine with a 3'-phosphorothioate linkage
  modified_base 3: mod_base = OTHER; note = 2'-O-methyladenosine
  modified_base 4: mod_base = gm
  modified_base 5: mod_base = cm
  modified_base 6: mod_base = cm
  modified_base 7: mod_base = gm
  modified_base 8: mod_base = OTHER; note = 2'-O-methyladenosine
  modified_base 9: mod_base = OTHER; note = 2'-fluoroguanosine
  modified_base 10: mod_base = OTHER; note = 2'-fluorouridine
  modified_base 11: mod_base = OTHER; note = 2'-fluorocytidine
  modified_base 12: mod_base = cm
  modified_base 13: mod_base = um
  modified_base 14: mod_base = um
  modified_base 15: mod_base = gm
  modified_base 16: mod_base = cm
  modified_base 17: mod_base = OTHER; note = 2'-O-methyladenosine
  modified_base 18: mod_base = gm
  modified_base 19: mod_base = OTHER; note = 2'-O-methyladenosine with a 3'-phosphorothioate linkage
  modified_base 20: mod_base = OTHER; note = 2'-O-methyluridine with a 3'-phosphorothioate linkage
  modified_base 21: mod_base = OTHER; note = 2'-O-methyladenosine
gcagccgagtccttgcagata

SEQ ID NO: 1655 - RNA, 23 nt, synthetic construct
  source 1..23: mol_type = other RNA
  modified_base 1: mod_base = OTHER; note = 2'-O-methyluridine with a 3'-phosphorothioate linkage and a 5'-phosphate substitution
  modified_base 2: mod_base = OTHER; note = 2'-fluoroadenosine with a 3'-phosphorothioate linkage
  modified_base 3: mod_base = um
  modified_base 4: mod_base = cm
  modified_base 5: mod_base = OTHER; note = 2'-fluorouridine
  modified_base 6: mod_base = gm
  modified_base 7: mod_base = OTHER; note = 2'-fluorocytidine
  modified_base 8: mod_base = OTHER; note = 2'-O-methyladenosine
  modified_base 9: mod_base = OTHER; note = 2'-O-methyladenosine
  modified_base 10: mod_base = gm
  modified_base 11: mod_base = gm
  modified_base 12: mod_base = OTHER; note = 2'-O-methyladenosine
  modified_base 13: mod_base = cm
  modified_base 14: mod_base = OTHER; note = 2'-fluorouridine
  modified_base 15: mod_base = cm
  modified_base 16: mod_base = OTHER; note = 2'-fluoroguanosine
  modified_base 17: mod_base = gm
  modified_base 18: mod_base = cm
  modified_base 19: mod_base = um
  modified_base 20: mod_base = gm
  modified_base 21: mod_base = OTHER; note = 2'-O-methylcytidine with a 3'-phosphorothioate linkage
  modified_base 22: mod_base = OTHER; note = 2'-O-methyluridine with a 3'-phosphorothioate linkage
  modified_base 23: mod_base = gm
tatctgcaaggactcggctgctg

SEQ ID NO: 1656 - RNA, 21 nt, synthetic construct
  source 1..21: mol_type = other RNA
  modified_base 1: mod_base = OTHER; note = 2'-O-methylcytidine with a 3'-phosphorothioate linkage
  modified_base 2: mod_base = OTHER; note = 2'-O-methyladenosine with a 3'-phosphorothioate linkage
  modified_base 3: mod_base = gm
  modified_base 4: mod_base = cm
  modified_base 5: mod_base = cm
  modified_base 6: mod_base = gm
  modified_base 7: mod_base = OTHER; note = 2'-O-methyladenosine
  modified_base 8: mod_base = gm
  modified_base 9: mod_base = OTHER; note = 2'-fluorouridine
  modified_base 10: mod_base = OTHER; note = 2'-fluorocytidine
  modified_base 11: mod_base = OTHER; note = 2'-fluorocytidine
  modified_base 12: mod_base = um
  modified_base 13: mod_base = um
  modified_base 14: mod_base = gm
  modified_base 15: mod_base = cm
  modified_base 16: mod_base = OTHER; note = 2'-O-methyladenosine
  modified_base 17: mod_base = gm
  modified_base 18: mod_base = OTHER; note = 2'-O-methyladenosine
  modified_base 19: mod_base = OTHER; note = 2'-O-methyluridine with a 3'-phosphorothioate linkage
  modified_base 20: mod_base = OTHER; note = 2'-O-methylguanosine with a 3'-phosphorothioate linkage
  modified_base 21: mod_base = OTHER; note = 2'-O-methyladenosine
cagccgagtccttgcagatga

SEQ ID NO: 1657 - RNA, 23 nt, synthetic construct
  source 1..23: mol_type = other RNA
  modified_base 1: mod_base = OTHER; note = 2'-O-methyluridine with a 3'-phosphorothioate linkage and a 5'-phosphate substitution
  modified_base 2: mod_base = OTHER; note = 2'-fluorocytidine with a 3'-phosphorothioate linkage
  modified_base 3: mod_base = OTHER; note = 2'-O-methyladenosine
  modified_base 4: mod_base = um
  modified_base 5: mod_base = OTHER; note = 2'-fluorocytidine
  modified_base 6: mod_base = um
  modified_base 7: mod_base = OTHER; note = 2'-fluoroguanosine
  modified_base 8: mod_base = cm
  modified_base 9: mod_base = OTHER; note = 2'-O-methyladenosine
  modified_base 10: mod_base = OTHER; note = 2'-O-methyladenosine
  modified_base 11: mod_base = gm
  modified_base 12: mod_base = gm
  modified_base 13: mod_base = OTHER; note = 2'-O-methyladenosine
  modified_base 14: mod_base = OTHER; note = 2'-fluorocytidine
  modified_base 15: mod_base = um
  modified_base 16: mod_base = OTHER; note = 2'-fluorocytidine
  modified_base 17: mod_base = gm
  modified_base 18: mod_base = gm
  modified_base 19: mod_base = cm
  modified_base 20: mod_base = um
  modified_base 21: mod_base = OTHER; note = 2'-O-methylguanosine with a 3'-phosphorothioate linkage
  modified_base 22: mod_base = OTHER; note = 2'-O-methylcytidine with a 3'-phosphorothioate linkage
  modified_base 23: mod_base = um
tcatctgcaaggactcggctgct

SEQ ID NO: 1658 - RNA, 21 nt, synthetic construct
  source 1..21: mol_type = other RNA
  modified_base 1: mod_base = OTHER; note = 2'-O-methylguanosine with a 3'-phosphorothioate linkage
  modified_base 2: mod_base = OTHER; note = 2'-O-methylcytidine with a 3'-phosphorothioate linkage
  modified_base 3: mod_base = cm
  modified_base 4: mod_base = gm
  modified_base 5: mod_base = OTHER; note = 2'-O-methyladenosine
  modified_base 6: mod_base = gm
  modified_base 7: mod_base = um
  modified_base 8: mod_base = cm
  modified_base 9: mod_base = OTHER; note = 2'-fluorocytidine
  modified_base 10: mod_base = OTHER; note = 2'-fluorouridine
  modified_base 11: mod_base = OTHER; note = 2'-fluorouridine
  modified_base 12: mod_base = gm
  modified_base 13: mod_base = cm
  modified_base 14: mod_base = OTHER; note = 2'-O-methyladenosine
  modified_base 15: mod_base = gm
  modified_base 16: mod_base = OTHER; note = 2'-O-methyladenosine
  modified_base 17: mod_base = um
  modified_base 18: mod_base = gm
  modified_base 19: mod_base = OTHER; note = 2'-O-methylguanosine with a 3'-phosphorothioate linkage
  modified_base 20: mod_base = OTHER; note = 2'-O-methylguanosine with a 3'-phosphorothioate linkage
  modified_base 21: mod_base = OTHER; note = 2'-O-methyladenosine
gccgagtccttgcagatggga

SEQ ID NO: 1659 - RNA, 23 nt, synthetic construct
  source 1..23: mol_type = other RNA
  modified_base 1: mod_base = OTHER; note = 2'-O-methyluridine with a 3'-phosphorothioate linkage and a 5'-phosphate substitution
  modified_base 2: mod_base = OTHER; note = 2'-fluorocytidine with a 3'-phosphorothioate linkage
  modified_base 3: mod_base = cm
  modified_base 4: mod_base = cm
  modified_base 5: mod_base = OTHER; note = 2'-fluoroadenosine
  modified_base 6: mod_base = um
  modified_base 7: mod_base = OTHER; note = 2'-fluorocytidine
  modified_base 8: mod_base = um
  modified_base 9: mod_base = gm
  modified_base 10: mod_base = cm
  modified_base 11: mod_base = OTHER; note = 2'-O-methyladenosine
  modified_base 12: mod_base = OTHER; note = 2'-O-methyladenosine
  modified_base 13: mod_base = gm
  modified_base 14: mod_base = OTHER; note = 2'-fluoroguanosine
  modified_base 15: mod_base = OTHER; note = 2'-O-methyladenosine
  modified_base 16: mod_base = OTHER; note = 2'-fluorocytidine
  modified_base 17: mod_base = um
  modified_base 18: mod_base = cm
  modified_base 19: mod_base = gm
  modified_base 20: mod_base = gm
  modified_base 21: mod_base = OTHER; note = 2'-O-methylcytidine with a 3'-phosphorothioate linkage
  modified_base 22: mod_base = OTHER; note = 2'-O-methyluridine with a 3'-phosphorothioate linkage
  modified_base 23: mod_base = gm
tcccatctgcaaggactcggctg

SEQ ID NO: 1660 - RNA, 21 nt, synthetic construct
  source 1..21: mol_type = other RNA
  modified_base 1: mod_base = OTHER; note = 2'-O-methylcytidine with a 3'-phosphorothioate linkage
  modified_base 2: mod_base = OTHER; note = 2'-O-methylguanosine with a 3'-phosphorothioate linkage
  modified_base 3: mod_base = OTHER; note = 2'-O-methyladenosine
  modified_base 4: mod_base = gm
  modified_base 5: mod_base = um
  modified_base 6: mod_base = cm
  modified_base 7: mod_base = cm
  modified_base 8: mod_base = um
  modified_base 9: mod_base = OTHER; note = 2'-fluorouridine
  modified_base 10: mod_base = OTHER; note = 2'-fluoroguanosine
  modified_base 11: mod_base = OTHER; note = 2'-fluorocytidine
  modified_base 12: mod_base = OTHER; note = 2'-O-methyladenosine
  modified_base 13: mod_base = gm
  modified_base 14: mod_base = OTHER; note = 2'-O-methyladenosine
  modified_base 15: mod_base = um
  modified_base 16: mod_base = gm
  modified_base 17: mod_base = gm
  modified_base 18: mod_base = gm
  modified_base 19: mod_base = OTHER; note = 2'-O-methyladenosine with a 3'-phosphorothioate linkage
  modified_base 20: mod_base = OTHER; note = 2'-O-methyluridine with a 3'-phosphorothioate linkage
  modified_base 21: mod_base = OTHER; note = 2'-O-methyladenosine
cgagtccttgcagatgggata

SEQ ID NO: 1661 - RNA, 23 nt, synthetic construct
  source 1..23: mol_type = other RNA
  modified_base 1: mod_base = OTHER; note = 2'-O-methyluridine with a 3'-phosphorothioate linkage and a 5'-phosphate substitution
  modified_base 2: mod_base = OTHER; note = 2'-fluoroadenosine with a 3'-phosphorothioate linkage
  modified_base 3: mod_base = um
  modified_base 4: mod_base = cm
  modified_base 5: mod_base = OTHER; note = 2'-fluorocytidine
  modified_base 6: mod_base = cm
  modified_base 7: mod_base = OTHER; note = 2'-fluoroadenosine
  modified_base 8: mod_base = um
  modified_base 9: mod_base = cm
  modified_base 10: mod_base = um
  modified_base 11: mod_base = gm
  modified_base 12: mod_base = cm
  modified_base 13: mod_base = OTHER; note = 2'-O-methyladenosine
  modified_base 14: mod_base = OTHER; note = 2'-fluoroadenosine
  modified_base 15: mod_base = gm
  modified_base 16: mod_base = OTHER; note = 2'-fluoroguanosine
  modified_base 17: mod_base = OTHER; note = 2'-O-methyladenosine
  modified_base 18: mod_base = cm
  modified_base 19: mod_base = um
  modified_base 20: mod_base = cm
  modified_base 21: mod_base = OTHER; note = 2'-O-methylguanosine with a 3'-phosphorothioate linkage
  modified_base 22: mod_base = OTHER; note = 2'-O-methylguanosine with a 3'-phosphorothioate linkage
  modified_base 23: mod_base = cm
tatcccatctgcaaggactcggc

SEQ ID NO: 1662 - RNA, 21 nt, synthetic construct
  source 1..21: mol_type = other RNA
  modified_base 1: mod_base = OTHER; note = 2'-O-methyluridine with a 3'-phosphorothioate linkage
  modified_base 2: mod_base = OTHER; note = 2'-O-methyluridine with a 3'-phosphorothioate linkage
  modified_base 3: mod_base = gm
  modified_base 4: mod_base = cm
  modified_base 5: mod_base = OTHER; note = 2'-O-methyladenosine
  modified_base 6: mod_base = gm
  modified_base 7: mod_base = OTHER; note = 2'-O-methyladenosine
  modified_base 8: mod_base = um
  modified_base 9: mod_base = OTHER; note = 2'-fluoroguanosine
  modified_base 10: mod_base = OTHER; note = 2'-fluoroguanosine
  modified_base 11: mod_base = OTHER; note = 2'-fluoroguanosine
  modified_base 12: mod_base = OTHER; note = 2'-O-methyladenosine
  modified_base 13: mod_base = um
  modified_base 14: mod_base = gm
  modified_base 15: mod_base = OTHER; note = 2'-O-methyladenosine
  modified_base 16: mod_base = cm
  modified_base 17: mod_base = um
  modified_base 18: mod_base = cm
  modified_base 19: mod_base = OTHER; note = 2'-O-methylguanosine with a 3'-phosphorothioate linkage
  modified_base 20: mod_base = OTHER; note = 2'-O-methyluridine with a 3'-phosphorothioate linkage
  modified_base 21: mod_base = OTHER; note = 2'-O-methyladenosine
ttgcagatgggatgactcgta

SEQ ID NO: 1663 - RNA, 23 nt, synthetic construct
  source 1..23: mol_type = other RNA
  modified_base 1: mod_base = OTHER; note = 2'-O-methyluridine with a 3'-phosphorothioate linkage and a 5'-phosphate substitution
  modified_base 2: mod_base = OTHER; note = 2'-fluoroadenosine with a 3'-phosphorothioate linkage
  modified_base 3: mod_base = cm
  modified_base 4: mod_base = gm
  modified_base 5: mod_base = OTHER; note = 2'-fluoroadenosine
  modified_base 6: mod_base = gm
  modified_base 7: mod_base = OTHER; note = 2'-fluorouridine
  modified_base 8: mod_base = cm
  modified_base 9: mod_base = OTHER; note = 2'-O-methyladenosine
  modified_base 10: mod_base = um
  modified_base 11: mod_base = cm
  modified_base 12: mod_base = cm
  modified_base 13: mod_base = cm
  modified_base 14: mod_base = OTHER; note = 2'-fluoroadenosine
  modified_base 15: mod_base = um
  modified_base 16: mod_base = OTHER; note = 2'-fluorocytidine
  modified_base 17: mod_base = um
  modified_base 18: mod_base = gm
  modified_base 19: mod_base = cm
  modified_base 20: mod_base = OTHER; note = 2'-O-methyladenosine
  modified_base 21: mod_base = OTHER; note = 2'-O-methyladenosine with a 3'-phosphorothioate linkage
  modified_base 22: mod_base = OTHER; note = 2'-O-methylguanosine with a 3'-phosphorothioate linkage
  modified_base 23: mod_base = gm
tacgagtcatcccatctgcaagg

SEQ ID NO: 1664 - RNA, 21 nt, synthetic construct
  source 1..21: mol_type = other RNA
  modified_base 1: mod_base = OTHER; note = 2'-O-methyluridine with a 3'-phosphorothioate linkage
  modified_base 2: mod_base = OTHER; note = 2'-O-methylguanosine with a 3'-phosphorothioate linkage
  modified_base 3: mod_base = cm
  modified_base 4: mod_base = OTHER; note = 2'-O-methyladenosine
  modified_base 5: mod_base = gm
  modified_base 6: mod_base = OTHER; note = 2'-O-methyladenosine
  modified_base 7: mod_base = um
  modified_base 8: mod_base = gm
  modified_base 9: mod_base = OTHER; note = 2'-fluoroguanosine
  modified_base 10: mod_base = OTHER; note = 2'-fluoroguanosine
  modified_base 11: mod_base = OTHER; note = 2'-fluoroadenosine
  modified_base 12: mod_base = um
  modified_base 13: mod_base = gm
  modified_base 14: mod_base = OTHER; note = 2'-O-methyladenosine
  modified_base 15: mod_base = cm
  modified_base 16: mod_base = um
  modified_base 17: mod_base = cm
  modified_base 18: mod_base = gm
  modified_base 19: mod_base = OTHER; note = 2'-O-methyluridine with a 3'-phosphorothioate linkage
  modified_base 20: mod_base = OTHER; note = 2'-O-methylguanosine with a 3'-phosphorothioate linkage
  modified_base 21: mod_base = OTHER; note = 2'-O-methyladenosine
tgcagatgggatgactcgtga

SEQ ID NO: 1665 - RNA, 23 nt, synthetic construct
  source 1..23: mol_type = other RNA
  modified_base 1: mod_base = OTHER; note = 2'-O-methyluridine with a 3'-phosphorothioate linkage and a 5'-phosphate substitution
  modified_base 2: mod_base = OTHER; note = 2'-fluorocytidine with a 3'-phosphorothioate linkage
  modified_base 3: mod_base = OTHER; note = 2'-O-methyladenosine
  modified_base 4: mod_base = cm
  modified_base 5: mod_base = OTHER; note = 2'-fluoroguanosine
  modified_base 6: mod_base = OTHER; note = 2'-O-methyladenosine
  modified_base 7: mod_base = OTHER; note = 2'-fluoroguanosine
  modified_base 8: mod_base = um
  modified_base 9: mod_base = cm
  modified_base 10: mod_base = OTHER; note = 2'-O-methyladenosine
  modified_base 11: mod_base = um
  modified_base 12: mod_base = cm
  modified_base 13: mod_base = cm
  modified_base 14: mod_base = OTHER; note = 2'-fluorocytidine
  modified_base 15: mod_base = OTHER; note = 2'-O-methyladenosine
  modified_base 16: mod_base = OTHER; note = 2'-fluorouridine
  modified_base 17: mod_base = cm
  modified_base 18: mod_base = um
  modified_base 19: mod_base = gm
  modified_base 20: mod_base = cm
  modified_base 21: mod_base = OTHER; note = 2'-O-methyladenosine with a 3'-phosphorothioate linkage
  modified_base 22: mod_base = OTHER; note = 2'-O-methyladenosine with a 3'-phosphorothioate linkage
  modified_base 23: mod_base = gm
tcacgagtcatcccatctgcaag

SEQ ID NO: 1666 - RNA, 21 nt, synthetic construct
  source 1..21: mol_type = other RNA
  modified_base 1: mod_base = OTHER; note = 2'-O-methylguanosine with a 3'-phosphorothioate linkage
  modified_base 2: mod_base = OTHER; note = 2'-O-methylcytidine with a 3'-phosphorothioate linkage
  modified_base 3: mod_base = OTHER; note = 2'-O-methyladenosine
  modified_base 4: mod_base = gm
  modified_base 5: mod_base = OTHER; note = 2'-O-methyladenosine
  modified_base 6: mod_base = um
  modified_base 7: mod_base = gm
  modified_base 8: mod_base = gm
  modified_base 9: mod_base = OTHER; note = 2'-fluoroguanosine
  modified_base 10: mod_base = OTHER; note = 2'-fluoroadenosine
  modified_base 11: mod_base = OTHER; note = 2'-fluorouridine
  modified_base 12: mod_base = gm
  modified_base 13: mod_base = OTHER; note = 2'-O-methyladenosine
  modified_base 14: mod_base = cm
  modified_base 15: mod_base = um
  modified_base 16: mod_base = cm
  modified_base 17: mod_base = gm
  modified_base 18: mod_base = um
  modified_base 19: mod_base = OTHER; note = 2'-O-methylguanosine with a 3'-phosphorothioate linkage
  modified_base 20: mod_base = OTHER; note = 2'-O-methylguanosine with a 3'-phosphorothioate linkage
  modified_base 21: mod_base = OTHER; note = 2'-O-methyladenosine
gcagatgggatgactcgtgga

SEQ ID NO: 1667 - RNA, 23 nt, synthetic construct
  source 1..23: mol_type = other RNA
  modified_base 1: mod_base = OTHER; note = 2'-O-methyluridine with a 3'-phosphorothioate linkage and a 5'-phosphate substitution
  modified_base 2: mod_base = OTHER; note = 2'-fluorocytidine with a 3'-phosphorothioate linkage
  modified_base 3: mod_base = cm
  modified_base 4: mod_base = OTHER; note = 2'-O-methyladenosine
  modified_base 5: mod_base = OTHER; note = 2'-fluorocytidine
  modified_base 6: mod_base = gm
  modified_base 7: mod_base = OTHER; note = 2'-fluoroadenosine
  modified_base 8: mod_base = gm
  modified_base 9: mod_base = um
  modified_base 10: mod_base = cm
  modified_base 11: mod_base = OTHER; note = 2'-O-methyladenosine
  modified_base 12: mod_base = um
  modified_base 13: mod_base = cm
  modified_base 14: mod_base = OTHER; note = 2'-fluorocytidine
  modified_base 15: mod_base = cm
  modified_base 16: mod_base = OTHER; note = 2'-fluoroadenosine
  modified_base 17: mod_base = um
  modified_base 18: mod_base = cm
  modified_base 19: mod_base = um
  modified_base 20: mod_base = gm
  modified_base 21: mod_base = OTHER; note = 2'-O-methylcytidine with a 3'-phosphorothioate linkage
  modified_base 22: mod_base = OTHER; note = 2'-O-methyladenosine with a 3'-phosphorothioate linkage
  modified_base 23: mod_base = OTHER; note = 2'-O-methyladenosine
tccacgagtcatcccatctgcaa

SEQ ID NO: 1668 - RNA, 21 nt, synthetic construct
  source 1..21: mol_type = other RNA
  modified_base 1: mod_base = OTHER; note = 2'-O-methylcytidine with a 3'-phosphorothioate linkage
  modified_base 2: mod_base = OTHER; note = 2'-O-methyladenosine with a 3'-phosphorothioate linkage
  modified_base 3: mod_base = gm
  modified_base 4: mod_base = OTHER; note = 2'-O-methyladenosine
  modified_base 5: mod_base = um
  modified_base 6: mod_base = gm
  modified_base 7: mod_base = gm
  modified_base 8: mod_base = gm
  modified_base 9: mod_base = OTHER; note = 2'-fluoroadenosine
  modified_base 10: mod_base = OTHER; note = 2'-fluorouridine
  modified_base 11: mod_base = OTHER; note = 2'-fluoroguanosine
  modified_base 12: mod_base = OTHER; note = 2'-O-methyladenosine
  modified_base 13: mod_base = cm
  modified_base 14: mod_base = um
  modified_base 15: mod_base = cm
  modified_base 16: mod_base = gm
  modified_base 17: mod_base = um
  modified_base 18: mod_base = gm
  modified_base 19: mod_base = OTHER; note = 2'-O-methylguanosine with a 3'-phosphorothioate linkage
  modified_base 20: mod_base = OTHER; note = 2'-O-methylcytidine with a 3'-phosphorothioate linkage
  modified_base 21: mod_base = OTHER; note = 2'-O-methyladenosine
cagatgggatgactcgtggca

SEQ ID NO: 1669 - RNA, 23 nt, synthetic construct
  source 1..23: mol_type = other RNA
  modified_base 1: mod_base = OTHER; note = 2'-O-methyluridine with a 3'-phosphorothioate linkage and a 5'-phosphate substitution
  modified_base 2: mod_base = OTHER; note = 2'-fluoroguanosine with a 3'-phosphorothioate linkage
  modified_base 3: mod_base = cm
  modified_base 4: mod_base = cm
  modified_base 5: mod_base = OTHER; note = 2'-fluoroadenosine
  modified_base 6: mod_base = cm
  modified_base 7: mod_base = OTHER; note = 2'-fluoroguanosine
  modified_base 8: mod_base = OTHER; note = 2'-O-methyladenosine
  modified_base 9: mod_base = gm
  modified_base 10: mod_base = um
  modified_base 11: mod_base = cm
  modified_base 12: mod_base = OTHER; note = 2'-O-methyladenosine
  modified_base 13: mod_base = um
  modified_base 14: mod_base = OTHER; note = 2'-fluorocytidine
  modified_base 15: mod_base = cm
  modified_base 16: mod_base = OTHER; note = 2'-fluorocytidine
  modified_base 17: mod_base = OTHER; note = 2'-O-methyladenosine
  modified_base 18: mod_base = um
  modified_base 19: mod_base = cm
  modified_base 20: mod_base = um
  modified_base 21: mod_base = OTHER; note = 2'-O-methylguanosine with a 3'-phosphorothioate linkage
  modified_base 22: mod_base = OTHER; note = 2'-O-methylcytidine with a 3'-phosphorothioate linkage
  modified_base 23: mod_base = OTHER; note = 2'-O-methyladenosine
tgccacgagtcatcccatctgca

SEQ ID NO: 1670 - RNA, 21 nt, synthetic construct
  source 1..21: mol_type = other RNA
  modified_base 1: mod_base = OTHER; note = 2'-O-methyladenosine with a 3'-phosphorothioate linkage
  modified_base 2: mod_base = OTHER; note = 2'-O-methylguanosine with a 3'-phosphorothioate linkage
  modified_base 3: mod_base = OTHER; note = 2'-O-methyladenosine
  modified_base 4: mod_base = um
  modified_base 5: mod_base = gm
  modified_base 6: mod_base = gm
  modified_base 7: mod_base = gm
  modified_base 8: mod_base = OTHER; note = 2'-O-methyladenosine
  modified_base 9: mod_base = OTHER; note = 2'-fluorouridine
  modified_base 10: mod_base = OTHER; note = 2'-fluoroguanosine
  modified_base 11: mod_base = OTHER; note = 2'-fluoroadenosine
  modified_base 12: mod_base = cm
  modified_base 13: mod_base = um
  modified_base 14: mod_base = cm
  modified_base 15: mod_base = gm
  modified_base 16: mod_base = um
  modified_base 17: mod_base = gm
  modified_base 18: mod_base = gm
  modified_base 19: mod_base = OTHER; note = 2'-O-methylcytidine with a 3'-phosphorothioate linkage
  modified_base 20: mod_base = OTHER; note = 2'-O-methylcytidine with a 3'-phosphorothioate linkage
  modified_base 21: mod_base = OTHER; note = 2'-O-methyladenosine
agatgggatgactcgtggcca

SEQ ID NO: 1671 - RNA, 23 nt, synthetic construct
  source 1..23: mol_type = other RNA
  modified_base 1: mod_base = OTHER; note = 2'-O-methyluridine with a 3'-phosphorothioate linkage and a 5'-phosphate substitution
  modified_base 2: mod_base = OTHER; note = 2'-fluoroguanosine with a 3'-phosphorothioate linkage
  modified_base 3: mod_base = gm
  modified_base 4: mod_base = cm
  modified_base 5: mod_base = OTHER; note = 2'-fluorocytidine
  modified_base 6: mod_base = OTHER; note = 2'-O-methyladenosine
  modified_base 7: mod_base = OTHER; note = 2'-fluorocytidine
  modified_base 8: mod_base = gm
  modified_base 9: mod_base = OTHER; note = 2'-O-methyladenosine
  modified_base 10: mod_base = gm
  modified_base 11: mod_base = um
  modified_base 12: mod_base = cm
  modified_base 13: mod_base = OTHER; note = 2'-O-methyladenosine
  modified_base 14: mod_base = OTHER; note = 2'-fluorouridine
  modified_base 15: mod_base = cm
  modified_base 16: mod_base = OTHER; note = 2'-fluorocytidine
  modified_base 17: mod_base = cm
  modified_base 18: mod_base = OTHER; note = 2'-O-methyladenosine
  modified_base 19: mod_base = um
  modified_base 20: mod_base = cm
  modified_base 21: mod_base = OTHER; note = 2'-O-methyluridine with a 3'-phosphorothioate linkage
  modified_base 22: mod_base = OTHER; note = 2'-O-methylguanosine with a 3'-phosphorothioate linkage
  modified_base 23: mod_base = cm
tggccacgagtcatcccatctgc

SEQ ID NO: 1672 - RNA, 21 nt, synthetic construct
  source 1..21: mol_type = other RNA
  modified_base 1: mod_base = OTHER; note = 2'-O-methylguanosine with a 3'-phosphorothioate linkage
  modified_base 2: mod_base = OTHER; note = 2'-O-methyladenosine with a 3'-phosphorothioate linkage
  modified_base 3: mod_base = um
  modified_base 4: mod_base = gm
  modified_base 5: mod_base = gm
  modified_base 6: mod_base = gm
  modified_base 7: mod_base = OTHER; note = 2'-O-methyladenosine
  modified_base 8: mod_base = um
  modified_base 9: mod_base = OTHER; note = 2'-fluoroguanosine
  modified_base 10: mod_base = OTHER; note = 2'-fluoroadenosine
  modified_base 11: mod_base = OTHER; note = 2'-fluorocytidine
  modified_base 12: mod_base = um
  modified_base 13: mod_base = cm
  modified_base 14: mod_base = gm
  modified_base 15: mod_base = um
  modified_base 16: mod_base = gm
  modified_base 17: mod_base = gm
  modified_base 18: mod_base = cm
  modified_base 19: mod_base = OTHER; note = 2'-O-methylcytidine with a 3'-phosphorothioate linkage
  modified_base 20: mod_base = OTHER; note = 2'-O-methylcytidine with a 3'-phosphorothioate linkage
  modified_base 21: mod_base = OTHER; note = 2'-O-methyladenosine
gatgggatgactcgtggccca

SEQ ID NO: 1673 - RNA, 23 nt, synthetic construct
  source 1..23: mol_type = other RNA
  modified_base 1: mod_base = OTHER; note = 2'-O-methyluridine with a 3'-phosphorothioate linkage and a 5'-phosphate substitution
  modified_base 2: mod_base = OTHER; note = 2'-fluoroguanosine with a 3'-phosphorothioate linkage
  modified_base 3: mod_base = gm
  modified_base 4: mod_base = gm
  modified_base 5: mod_base = OTHER; note = 2'-fluorocytidine
  modified_base 6: mod_base = cm
  modified_base 7: mod_base = OTHER; note = 2'-fluoroadenosine
  modified_base 8: mod_base = cm
  modified_base 9: mod_base = gm
  modified_base 10: mod_base = OTHER; note = 2'-O-methyladenosine
  modified_base 11: mod_base = gm
  modified_base 12: mod_base = um
  modified_base 13: mod_base = cm
  modified_base 14: mod_base = OTHER; note = 2'-fluoroadenosine
  modified_base 15: mod_base = um
  modified_base 16: mod_base = OTHER; note = 2'-fluorocytidine
  modified_base 17: mod_base = cm
  modified_base 18: mod_base = cm
  modified_base 19: mod_base = OTHER; note = 2'-O-methyladenosine
  modified_base 20: mod_base = um
  modified_base 21: mod_base = OTHER; note = 2'-O-methylcytidine with a 3'-phosphorothioate linkage
  modified_base 22: mod_base = OTHER; note = 2'-O-methyluridine with a 3'-phosphorothioate linkage
  modified_base 23: mod_base = gm
tgggccacgagtcatcccatctg

SEQ ID NO: 1674 - RNA, 21 nt, synthetic construct
  source 1..21: mol_type = other RNA
  modified_base 1: mod_base = OTHER; note = 2'-O-methyladenosine with a 3'-phosphorothioate linkage
  modified_base 2: mod_base = OTHER; note = 2'-O-methyluridine with a 3'-phosphorothioate linkage
  modified_base 3: mod_base = gm
  modified_base 4: mod_base = gm
  modified_base 5: mod_base = gm
  modified_base 6: mod_base = OTHER; note = 2'-O-methyladenosine
  modified_base 7: mod_base = um
  modified_base 8: mod_base = gm
  modified_base 9: mod_base = OTHER; note = 2'-fluoroadenosine
  modified_base 10: mod_base = OTHER; note = 2'-fluorocytidine
  modified_base 11: mod_base = OTHER; note = 2'-fluorouridine
  modified_base 12: mod_base = cm
  modified_base 13: mod_base = gm
  modified_base 14: mod_base = um
  modified_base 15: mod_base = gm
  modified_base 16: mod_base = gm
  modified_base 17: mod_base = cm
  modified_base 18: mod_base = cm
  modified_base 19: mod_base = OTHER; note = 2'-O-methylcytidine with a 3'-phosphorothioate linkage
  modified_base 20: mod_base = OTHER; note = 2'-O-methyladenosine with a 3'-phosphorothioate linkage
  modified_base 21: mod_base = OTHER; note = 2'-O-methyladenosine
atgggatgactcgtggcccaa

SEQ ID NO: 1675 - RNA, 23 nt, synthetic construct
  source 1..23: mol_type = other RNA
  modified_base 1: mod_base = OTHER; note = 2'-O-methyluridine with a 3'-phosphorothioate linkage and a 5'-phosphate substitution
  modified_base 2: mod_base = OTHER; note = 2'-fluorouridine with a 3'-phosphorothioate linkage
  modified_base 3: mod_base = gm
  modified_base 4: mod_base = gm
  modified_base 5: mod_base = OTHER; note = 2'-fluoroguanosine
  modified_base 6: mod_base = cm
  modified_base 7: mod_base = OTHER; note = 2'-fluorocytidine
  modified_base 8: mod_base = OTHER; note = 2'-O-methyladenosine
  modified_base 9: mod_base = cm
  modified_base 10: mod_base = gm
  modified_base 11: mod_base = OTHER; note = 2'-O-methyladenosine
  modified_base 12: mod_base = gm
  modified_base 13: mod_base = um
  modified_base 14: mod_base = OTHER; note = 2'-fluorocytidine
  modified_base 15: mod_base = OTHER; note = 2'-O-methyladenosine
  modified_base 16: mod_base = OTHER; note = 2'-fluorouridine
  modified_base 17: mod_base = cm
  modified_base 18: mod_base = cm
  modified_base 19: mod_base = cm
  modified_base 20: mod_base = OTHER; note = 2'-O-methyladenosine
  modified_base 21: mod_base = OTHER; note = 2'-O-methyluridine with a 3'-phosphorothioate linkage
  modified_base 22: mod_base = OTHER; note = 2'-O-methylcytidine with a 3'-phosphorothioate linkage
  modified_base 23: mod_base = um
ttgggccacgagtcatcccatct

SEQ ID NO: 1676 - RNA, 21 nt, synthetic construct
  source 1..21: mol_type = other RNA
  modified_base 1: mod_base = OTHER; note = 2'-O-methyluridine with a 3'-phosphorothioate linkage
  modified_base 2: mod_base = OTHER; note = 2'-O-methylguanosine with a 3'-phosphorothioate linkage
  modified_base 3: mod_base = gm
  modified_base 4: mod_base = gm
  modified_base 5: mod_base = OTHER; note = 2'-O-methyladenosine
  modified_base 6: mod_base = um
  modified_base 7: mod_base = gm
  modified_base 8: mod_base = OTHER; note = 2'-O-methyladenosine
  modified_base 9: mod_base = OTHER; note = 2'-fluorocytidine
  modified_base 10: mod_base = OTHER; note = 2'-fluorouridine
  modified_base 11: mod_base = OTHER; note = 2'-fluorocytidine
  modified_base 12: mod_base = gm
  modified_base 13: mod_base = um
  modified_base 14: mod_base = gm
  modified_base 15: mod_base = gm
  modified_base 16: mod_base = cm
  modified_base 17: mod_base = cm
  modified_base 18: mod_base = cm
  modified_base 19: mod_base = OTHER; note = 2'-O-methyladenosine with a 3'-phosphorothioate linkage
  modified_base 20: mod_base = OTHER; note = 2'-O-methylguanosine with a 3'-phosphorothioate linkage
  modified_base 21: mod_base = OTHER; note = 2'-O-methyladenosine
tgggatgactcgtggcccaga

SEQ ID NO: 1677 - RNA, 23 nt, synthetic construct
  source 1..23: mol_type = other RNA
  modified_base 1: mod_base = OTHER; note = 2'-O-methyluridine with a 3'-phosphorothioate linkage and a 5'-phosphate substitution
  modified_base 2: mod_base = OTHER; note = 2'-fluorocytidine with a 3'-phosphorothioate linkage
  modified_base 3: mod_base = um
  modified_base 4: mod_base = gm
  modified_base 5: mod_base = OTHER; note = 2'-fluoroguanosine
  modified_base 6: mod_base = gm
  modified_base 7: mod_base = OTHER; note = 2'-fluorocytidine
  modified_base 8: mod_base = cm
  modified_base 9: mod_base = OTHER; note = 2'-O-methyladenosine
  modified_base 10: mod_base = cm
  modified_base 11: mod_base = gm
  modified_base 12: mod_base = OTHER; note = 2'-O-methyladenosine
  modified_base 13: mod_base = gm
  modified_base 14: mod_base = OTHER; note = 2'-fluorouridine
  modified_base 15: mod_base = cm
  modified_base 16: mod_base = OTHER; note = 2'-fluoroadenosine
  modified_base 17: mod_base = um
  modified_base 18: mod_base = cm
  modified_base 19: mod_base = cm
  modified_base 20: mod_base = cm
  modified_base 21: mod_base = OTHER; note = 2'-O-methyladenosine with a 3'-phosphorothioate linkage
  modified_base 22: mod_base = OTHER; note = 2'-O-methyluridine with a 3'-phosphorothioate linkage
  modified_base 23: mod_base = cm
tctgggccacgagtcatcccatc

SEQ ID NO: 1678 - RNA, 21 nt, synthetic construct
  source 1..21: mol_type = other RNA
  modified_base 1: mod_base = OTHER; note = 2'-O-methylguanosine with a 3'-phosphorothioate linkage
  modified_base 2: mod_base = OTHER; note = 2'-O-methylguanosine with a 3'-phosphorothioate linkage
  modified_base 3: mod_base = gm
  modified_base 4: mod_base = OTHER; note = 2'-O-methyladenosine
  modified_base 5: mod_base = um
  modified_base 6: mod_base = gm
  modified_base 7: mod_base = OTHER; note = 2'-O-methyladenosine
  modified_base 8: mod_base = cm
  modified_base 9: mod_base = OTHER; note = 2'-fluorouridine
  modified_base 10: mod_base = OTHER; note = 2'-fluorocytidine
  modified_base 11: mod_base = OTHER; note = 2'-fluoroguanosine
  modified_base 12: mod_base = um
  modified_base 13: mod_base = gm
  modified_base 14: mod_base = gm
  modified_base 15: mod_base = cm
  modified_base 16: mod_base = cm
  modified_base 17: mod_base = cm
  modified_base 18: mod_base = OTHER; note = 2'-O-methyladenosine
  modified_base 19: mod_base = OTHER; note = 2'-O-methylguanosine with a 3'-phosphorothioate linkage
  modified_base 20: mod_base = OTHER; note = 2'-O-methyluridine with a 3'-phosphorothioate linkage
  modified_base 21: mod_base = OTHER; note = 2'-O-methyladenosine
gggatgactcgtggcccagta

SEQ ID NO: 1679 - RNA, 23 nt, synthetic construct
  source 1..23: mol_type = other RNA
  modified_base 1: mod_base = OTHER; note = 2'-O-methyluridine with a 3'-phosphorothioate linkage and a 5'-phosphate substitution
  modified_base 2: mod_base = OTHER; note = 2'-fluoroadenosine with a 3'-phosphorothioate linkage
  modified_base 3: mod_base = cm
  modified_base 4: mod_base = um
  modified_base 5: mod_base = OTHER; note = 2'-fluoroguanosine
  modified_base 6: mod_base = gm
  modified_base 7: mod_base = OTHER; note = 2'-fluoroguanosine
  modified_base 8: mod_base = cm
  modified_base 9: mod_base = cm
  modified_base 10: mod_base = OTHER; note = 2'-O-methyladenosine
  modified_base 11: mod_base = cm
  modified_base 12: mod_base = gm
  modified_base 13: mod_base = OTHER; note = 2'-O-methyladenosine
  modified_base 14: mod_base = OTHER; note = 2'-fluoroguanosine
  modified_base 15: mod_base = um
  modified_base 16: mod_base = OTHER; note = 2'-fluorocytidine
  modified_base 17: mod_base = OTHER; note = 2'-O-methyladenosine
  modified_base 18: mod_base = um
  modified_base 19: mod_base = cm
  modified_base 20: mod_base = cm
  modified_base 21: mod_base = OTHER; note = 2'-O-methylcytidine with a 3'-phosphorothioate linkage
  modified_base 22: mod_base = OTHER; note = 2'-O-methyladenosine with a 3'-phosphorothioate linkage
  modified_base 23: mod_base = um
tactgggccacgagtcatcccat

SEQ ID NO: 1680 - RNA, 21 nt, synthetic construct
  source 1..21: mol_type = other RNA
  modified_base 1: mod_base = OTHER; note = 2'-O-methylguanosine with a 3'-phosphorothioate linkage
  modified_base 2: mod_base = OTHER; note = 2'-O-methyluridine with a 3'-phosphorothioate linkage
  modified_base 3: mod_base = gm
  modified_base 4: mod_base = gm
  modified_base 5: mod_base = cm
  modified_base 6: mod_base = cm
  modified_base 7: mod_base = cm
  modified_base 8: mod_base = OTHER; note = 2'-O-methyladenosine
  modified_base 9: mod_base = OTHER; note = 2'-fluoroguanosine
  modified_base 10: mod_base = OTHER; note = 2'-fluorouridine
  modified_base 11: mod_base = OTHER; note = 2'-fluorouridine
  modified_base 12: mod_base = gm
  modified_base 13: mod_base = um
  modified_base 14: mod_base = gm
  modified_base 15: mod_base = cm
  modified_base 16: mod_base = gm
  modified_base 17: mod_base = um
  modified_base 18: mod_base = cm
  modified_base 19: mod_base = OTHER; note = 2'-O-methyluridine with a 3'-phosphorothioate linkage
  modified_base 20: mod_base = OTHER; note = 2'-O-methyluridine with a 3'-phosphorothioate linkage
  modified_base 21: mod_base = OTHER; note = 2'-O-methyladenosine
gtggcccagttgtgcgtctta

SEQ ID NO: 1681 - RNA, 23 nt, synthetic construct
  source 1..23: mol_type = other RNA
  modified_base 1: mod_base = OTHER; note = 2'-O-methyluridine with a 3'-phosphorothioate linkage and a 5'-phosphate substitution
  modified_base 2: mod_base = OTHER; note = 2'-fluoroadenosine with a 3'-phosphorothioate linkage
  modified_base 3: mod_base = OTHER; note = 2'-O-methyladenosine
  modified_base 4: mod_base = gm
  modified_base 5: mod_base = OTHER; note = 2'-fluoroadenosine
  modified_base 6: mod_base = cm
  modified_base 7: mod_base = OTHER; note = 2'-fluoroguanosine
  modified_base 8: mod_base = cm
  modified_base 9: mod_base = OTHER; note = 2'-O-methyladenosine
  modified_base 10: mod_base = cm
  modified_base 11: mod_base = OTHER; note = 2'-O-methyladenosine
  modified_base 12: mod_base = OTHER; note = 2'-O-methyladenosine
  modified_base 13: mod_base = cm
  modified_base 14: mod_base = OTHER; note = 2'-fluorouridine
  modified_base 15: mod_base = gm
  modified_base 16: mod_base = OTHER; note = 2'-fluoroguanosine
  modified_base 17: mod_base = gm
  modified_base 18: mod_base = cm
  modified_base 19: mod_base = cm
  modified_base 20: mod_base = OTHER; note = 2'-O-methyladenosine
  modified_base 21: mod_base = OTHER; note = 2'-O-methylcytidine with a 3'-phosphorothioate linkage
  modified_base 22: mod_base = OTHER; note = 2'-O-methylguanosine with a 3'-phosphorothioate linkage
  modified_base 23: mod_base = OTHER; note = 2'-O-methyladenosine
taagacgcacaactgggccacga

SEQ ID NO: 1682 - RNA, 21 nt, synthetic construct
  source 1..21: mol_type = other RNA
  modified_base 1: mod_base = OTHER; note = 2'-O-methyluridine with a 3'-phosphorothioate linkage
  modified_base 2: mod_base = OTHER; note = 2'-O-methylguanosine with a 3'-phosphorothioate linkage
  modified_base 3: mod_base = gm
  modified_base 4: mod_base = cm
  modified_base 5: mod_base = cm
  modified_base 6: mod_base = cm
  modified_base 7: mod_base = OTHER; note = 2'-O-methyladenosine
  modified_base 8: mod_base = gm
  modified_base 9: mod_base = OTHER; note = 2'-fluorouridine
  modified_base 10: mod_base = OTHER; note = 2'-fluorouridine
  modified_base 11: mod_base = OTHER; note = 2'-fluoroguanosine
  modified_base 12: mod_base = um
  modified_base 13: mod_base = gm
  modified_base 14: mod_base = cm
  modified_base 15: mod_base = gm
  modified_base 16: mod_base = um
  modified_base 17: mod_base = cm
  modified_base 18: mod_base = um
  modified_base 19: mod_base = OTHER; note = 2'-O-methyluridine with a 3'-phosphorothioate linkage
  modified_base 20: mod_base = OTHER; note = 2'-O-methylcytidine with a 3'-phosphorothioate linkage
  modified_base 21: mod_base = OTHER; note = 2'-O-methyladenosine
tggcccagttgtgcgtcttca

SEQ ID NO: 1683 - RNA, 23 nt, synthetic construct
  source 1..23: mol_type = other RNA
  modified_base 1: mod_base = OTHER; note = 2'-O-methyluridine with a 3'-phosphorothioate linkage and a 5'-phosphate substitution
  modified_base 2: mod_base = OTHER; note = 2'-fluoroguanosine with a 3'-phosphorothioate linkage
  modified_base 3: mod_base = OTHER; note = 2'-O-methyladenosine
  modified_base 4: mod_base = OTHER; note = 2'-O-methyladenosine
  modified_base 5: mod_base = OTHER; note = 2'-fluoroguanosine
  modified_base 6: mod_base = OTHER; note = 2'-O-methyladenosine
  modified_base 7: mod_base = OTHER; note = 2'-fluorocytidine
  modified_base 8: mod_base = gm
  modified_base 9: mod_base = cm
  modified_base 10: mod_base = OTHER; note = 2'-O-methyladenosine
  modified_base 11: mod_base = cm
  modified_base 12: mod_base = OTHER; note = 2'-O-methyladenosine
  modified_base 13: mod_base = OTHER; note = 2'-O-methyladenosine
  modified_base 14: mod_base = OTHER; note = 2'-fluorocytidine
  modified_base 15: mod_base = um
  modified_base 16: mod_base = OTHER; note = 2'-fluoroguanosine
  modified_base 17: mod_base = gm
  modified_base 18: mod_base = gm
  modified_base 19: mod_base = cm
  modified_base 20: mod_base = cm
  modified_base 21: mod_base = OTHER; note = 2'-O-methyladenosine with a 3'-phosphorothioate linkage
  modified_base 22: mod_base = OTHER; note = 2'-O-methylcytidine with a 3'-phosphorothioate linkage
  modified_base 23: mod_base = gm
tgaagacgcacaactgggccacg

SEQ ID NO: 1684 - RNA, 21 nt, synthetic construct
  source 1..21: mol_type = other RNA
  modified_base 1: mod_base = OTHER; note = 2'-O-methylguanosine with a 3'-phosphorothioate linkage
  modified_base 2: mod_base = OTHER; note = 2'-O-methylcytidine with a 3'-phosphorothioate linkage
  modified_base 3: mod_base = cm
  modified_base 4: mod_base = cm
  modified_base 5: mod_base = OTHER; note = 2'-O-methyladenosine
  modified_base 6: mod_base = gm
  modified_base 7: mod_base = um
  modified_base 8: mod_base = um
  modified_base 9: mod_base = OTHER; note = 2'-fluoroguanosine
  modified_base 10: mod_base = OTHER; note = 2'-fluorouridine
  modified_base 11: mod_base = OTHER; note = 2'-fluoroguanosine
  modified_base 12: mod_base = cm
  modified_base 13: mod_base = gm
  modified_base 14: mod_base = um
  modified_base 15: mod_base = cm
  modified_base 16: mod_base = um
  modified_base 17: mod_base = um
  modified_base 18: mod_base = cm
  modified_base 19: mod_base = OTHER; note = 2'-O-methylcytidine with a 3'-phosphorothioate linkage
  modified_base 20: mod_base = OTHER; note = 2'-O-methyladenosine with a 3'-phosphorothioate linkage
  modified_base 21: mod_base = OTHER; note = 2'-O-methyladenosine
gcccagttgtgcgtcttccaa

SEQ ID NO: 1685 - RNA, 23 nt, synthetic construct
  source 1..23: mol_type = other RNA
  modified_base 1: mod_base = OTHER; note = 2'-O-methyluridine with a 3'-phosphorothioate linkage and a 5'-phosphate substitution
  modified_base 2: mod_base = OTHER; note = 2'-fluorouridine with a 3'-phosphorothioate linkage
  modified_base 3: mod_base = gm
  modified_base 4: mod_base = gm
  modified_base 5: mod_base = OTHER; note = 2'-fluoroadenosine
  modified_base 6: mod_base = OTHER; note = 2'-O-methyladenosine
  modified_base 7: mod_base = OTHER; note = 2'-fluoroguanosine
  modified_base 8: mod_base = OTHER; note = 2'-O-methyladenosine
  modified_base 9: mod_base = cm
  modified_base 10: mod_base = gm
  modified_base 11: mod_base = cm
  modified_base 12: mod_base = OTHER; note = 2'-O-methyladenosine
  modified_base 13: mod_base = cm
  modified_base 14: mod_base = OTHER; note = 2'-fluoroadenosine
  modified_base 15: mod_base = OTHER; note = 2'-O-methyladenosine
  modified_base 16: mod_base = OTHER; note = 2'-fluorocytidine
  modified_base 17: mod_base = um
  modified_base 18: mod_base = gm
  modified_base 19: mod_base = gm
  modified_base 20: mod_base = gm
  modified_base 21: mod_base = OTHER; note = 2'-O-methylcytidine with a 3'-phosphorothioate linkage
  modified_base 22: mod_base = OTHER; note = 2'-O-methylcytidine with a 3'-phosphorothioate linkage
  modified_base 23: mod_base = OTHER; note = 2'-O-methyladenosine
ttggaagacgcacaactgggcca

SEQ ID NO: 1686 - RNA, 21 nt, synthetic construct
  source 1..21: mol_type = other RNA
  modified_base 1: mod_base = OTHER; note = 2'-O-methylcytidine with a 3'-phosphorothioate linkage
  modified_base 2: mod_base = OTHER; note = 2'-O-methylcytidine with a 3'-phosphorothioate linkage
  modified_base 3: mod_base = cm
  modified_base 4: mod_base = OTHER; note = 2'-O-methyladenosine
  modified_base 5: mod_base = gm
  modified_base 6: mod_base = um
  modified_base 7: mod_base = um
  modified_base 8: mod_base = gm
  modified_base 9: mod_base = OTHER; note = 2'-fluorouridine
  modified_base 10: mod_base = OTHER; note = 2'-fluoroguanosine
  modified_base 11: mod_base = OTHER; note = 2'-fluorocytidine
  modified_base 12: mod_base = gm
  modified_base 13: mod_base = um
  modified_base 14: mod_base = cm
  modified_base 15: mod_base = um
  modified_base 16: mod_base = um
  modified_base 17: mod_base = cm
  modified_base 18: mod_base = cm
  modified_base 19: mod_base = OTHER; note = 2'-O-methyladenosine with a 3'-phosphorothioate linkage
  modified_base 20: mod_base = OTHER; note = 2'-O-methylcytidine with a 3'-phosphorothioate linkage
  modified_base 21: mod_base = OTHER; note = 2'-O-methyladenosine
cccagttgtgcgtcttccaca

SEQ ID NO: 1687 - RNA, 23 nt, synthetic construct
  source 1..23: mol_type = other RNA
  modified_base 1: mod_base = OTHER; note = 2'-O-methyluridine with a 3'-phosphorothioate linkage and a 5'-phosphate substitution
  modified_base 2: mod_base = OTHER; note = 2'-fluoroguanosine with a 3'-phosphorothioate linkage
  modified_base 3: mod_base = um
  modified_base 4: mod_base = gm
  modified_base 5: mod_base = OTHER; note = 2'-fluoroguanosine
  modified_base 6: mod_base = OTHER; note = 2'-O-methyladenosine
  modified_base 7: mod_base = OTHER; note = 2'-fluoroadenosine
  modified_base 8: mod_base = gm
  modified_base 9: mod_base = OTHER; note = 2'-O-methyladenosine
  modified_base 10: mod_base = cm
  modified_base 11: mod_base = gm
  modified_base 12: mod_base = cm
  modified_base 13: mod_base = OTHER; note = 2'-O-methyladenosine
  modified_base 14: mod_base = OTHER; note = 2'-fluorocytidine
  modified_base 15: mod_base = OTHER; note = 2'-O-methyladenosine
  modified_base 16: mod_base = OTHER; note = 2'-fluoroadenosine
  modified_base 17: mod_base = cm
  modified_base 18: mod_base = um
  modified_base 19: mod_base = gm
  modified_base 20: mod_base = gm
  modified_base 21: mod_base = OTHER; note = 2'-O-methylguanosine with a 3'-phosphorothioate linkage
  modified_base 22: mod_base = OTHER; note = 2'-O-methylcytidine with a 3'-phosphorothioate linkage
  modified_base 23: mod_base = cm
tgtggaagacgcacaactgggcc

SEQ ID NO: 1688 - RNA, 21 nt, synthetic construct
  source 1..21: mol_type = other RNA
  modified_base 1: mod_base = OTHER; note = 2'-O-methylcytidine with a 3'-phosphorothioate linkage
  modified_base 2: mod_base = OTHER; note = 2'-O-methylcytidine with a 3'-phosphorothioate linkage
  modified_base 3: mod_base = OTHER; note = 2'-O-methyladenosine
  modified_base 4: mod_base = gm
  modified_base 5: mod_base = um
  modified_base 6: mod_base = um
  modified_base 7: mod_base = gm
  modified_base 8: mod_base = um
  modified_base 9: mod_base = OTHER; note = 2'-fluoroguanosine
  modified_base 10: mod_base = OTHER; note = 2'-fluorocytidine
  modified_base 11: mod_base = OTHER; note = 2'-fluoroguanosine
  modified_base 12: mod_base = um
  modified_base 13: mod_base = cm
  modified_base 14: mod_base = um
  modified_base 15: mod_base = um
  modified_base 16: mod_base = cm
  modified_base 17: mod_base = cm
  modified_base 18: mod_base = OTHER; note = 2'-O-methyladenosine
  modified_base 19: mod_base = OTHER; note = 2'-O-methylcytidine with a 3'-phosphorothioate linkage
  modified_base 20: mod_base = OTHER; note = 2'-O-methylguanosine with a 3'-phosphorothioate linkage
  modified_base 21: mod_base = OTHER; note = 2'-O-methyladenosine
ccagttgtgcgtcttccacga

SEQ ID NO: 1689 - RNA, 23 nt, synthetic construct
  source 1..23: mol_type = other RNA
  modified_base 1: mod_base = OTHER; note = 2'-O-methyluridine with a 3'-phosphorothioate linkage and a 5'-phosphate substitution
  modified_base 2: mod_base = OTHER; note = 2'-fluorocytidine with a 3'-phosphorothioate linkage
  modified_base 3: mod_base = gm
  modified_base 4: mod_base = um
  modified_base 5: mod_base = OTHER; note = 2'-fluoroguanosine
  modified_base 6: mod_base = gm
  modified_base 7: mod_base = OTHER; note = 2'-fluoroadenosine
  modified_base 8: mod_base = OTHER; note = 2'-O-methyladenosine
  modified_base 9: mod_base = gm
  modified_base 10: mod_base = OTHER; note = 2'-O-methyladenosine
  modified_base 11: mod_base = cm
  modified_base 12: mod_base = gm
  modified_base 13: mod_base = cm
  modified_base 14: mod_base = OTHER; note = 2'-fluoroadenosine
  modified_base 15: mod_base = cm
  modified_base 16: mod_base = OTHER; note = 2'-fluoroadenosine
  modified_base 17: mod_base = OTHER; note = 2'-O-methyladenosine
  modified_base 18: mod_base = cm
  modified_base 19: mod_base = um
  modified_base 20: mod_base = gm
  modified_base 21: mod_base = OTHER; note = 2'-O-methylguanosine with a 3'-phosphorothioate linkage
  modified_base 22: mod_base = OTHER; note = 2'-O-methylguanosine with a 3'-phosphorothioate linkage
  modified_base 23: mod_base = cm
tcgtggaagacgcacaactgggc

SEQ ID NO: 1690 - RNA, 21 nt, synthetic construct
  source 1..21: mol_type = other RNA
  modified_base 1: mod_base = OTHER; note = 2'-O-methylcytidine with a 3'-phosphorothioate linkage
  modified_base 2: mod_base = OTHER; note = 2'-O-methyladenosine with a 3'-phosphorothioate linkage
  modified_base 3: mod_base = gm
  modified_base 4: mod_base = um
  modified_base 5: mod_base = um
  modified_base 6: mod_base = gm
  modified_base 7: mod_base = um
  modified_base 8: mod_base = gm
  modified_base 9: mod_base = OTHER; note = 2'-fluorocytidine
  modified_base 10: mod_base = OTHER; note = 2'-fluoroguanosine
  modified_base 11: mod_base = OTHER; note = 2'-fluorouridine
  modified_base 12: mod_base = cm
  modified_base 13: mod_base = um
  modified_base 14: mod_base = um
  modified_base 15: mod_base = cm
  modified_base 16: mod_base = cm
  modified_base 17: mod_base = OTHER; note = 2'-O-methyladenosine
  modified_base 18: mod_base = cm
  modified_base 19: mod_base = OTHER; note = 2'-O-methylguanosine with a 3'-phosphorothioate linkage
  modified_base 20: mod_base = OTHER; note = 2'-O-methyluridine with a 3'-phosphorothioate linkage
  modified_base 21: mod_base = OTHER; note = 2'-O-methyladenosine
cagttgtgcgtcttccacgta

SEQ ID NO: 1691 - RNA, 23 nt, synthetic construct
  source 1..23: mol_type = other RNA
  modified_base 1: mod_base = OTHER; note = 2'-O-methyluridine with a 3'-phosphorothioate linkage and a 5'-phosphate substitution
  modified_base 2: mod_base = OTHER; note = 2'-fluoroadenosine with a 3'-phosphorothioate linkage
  modified_base 3: mod_base = cm
  modified_base 4: mod_base = gm
  modified_base 5: mod_base = OTHER; note = 2'-fluorouridine
  modified_base 6: mod_base = gm
  modified_base 7: mod_base = OTHER; note = 2'-fluoroguanosine
  modified_base 8: mod_base = OTHER; note = 2'-O-methyladenosine
  modified_base 9: mod_base = OTHER; note = 2'-O-methyladenosine
  modified_base 10: mod_base = gm
  modified_base 11: mod_base = OTHER; note = 2'-O-methyladenosine
  modified_base 12: mod_base = cm
  modified_base 13: mod_base = gm
  modified_base 14: mod_base = OTHER; note = 2'-fluorocytidine
  modified_base 15: mod_base = OTHER; note = 2'-O-methyladenosine
  modified_base 16: mod_base = OTHER; note = 2'-fluorocytidine
  modified_base 17: mod_base = OTHER; note = 2'-O-methyladenosine
  modified_base 18: mod_base = OTHER; note = 2'-O-methyladenosine
  modified_base 19: mod_base = cm
  modified_base 20: mod_base = um
  modified_base 21: mod_base = OTHER; note = 2'-O-methylguanosine with a 3'-phosphorothioate linkage
  modified_base 22: mod_base = OTHER; note = 2'-O-methylguanosine with a 3'-phosphorothioate linkage
  modified_base 23: mod_base = gm
tacgtggaagacgcacaactggg

SEQ ID NO: 1692 - RNA, 21 nt, synthetic construct
  source 1..21: mol_type = other RNA
  modified_base 1: mod_base = OTHER; note = 2'-O-methyladenosine with a 3'-phosphorothioate linkage
  modified_base 2: mod_base = OTHER; note = 2'-O-methylguanosine with a 3'-phosphorothioate linkage
  modified_base 3: mod_base = um
  modified_base 4: mod_base = um
  modified_base 5: mod_base = gm
  modified_base 6: mod_base = um
  modified_base 7: mod_base = gm
  modified_base 8: mod_base = cm
  modified_base 9: mod_base = OTHER; note = 2'-fluoroguanosine
  modified_base 10: mod_base = OTHER; note = 2'-fluorouridine
  modified_base 11: mod_base = OTHER; note = 2'-fluorocytidine
  modified_base 12: mod_base = um
  modified_base 13: mod_base = um
  modified_base 14: mod_base = cm
  modified_base 15: mod_base = cm
  modified_base 16: mod_base = OTHER; note = 2'-O-methyladenosine
  modified_base 17: mod_base = cm
  modified_base 18: mod_base = gm
  modified_base 19: mod_base = OTHER; note = 2'-O-methyluridine with a 3'-phosphorothioate linkage
  modified_base 20: mod_base = OTHER; note = 2'-O-methylguanosine with a 3'-phosphorothioate linkage
  modified_base 21: mod_base = OTHER; note = 2'-O-methyladenosine
agttgtgcgtcttccacgtga

SEQ ID NO: 1693 - RNA, 23 nt, synthetic construct
  source 1..23: mol_type = other RNA
  modified_base 1: mod_base = OTHER; note = 2'-O-methyluridine with a 3'-phosphorothioate linkage and a 5'-phosphate substitution
  modified_base 2: mod_base = OTHER; note = 2'-fluorocytidine with a 3'-phosphorothioate linkage
  modified_base 3: mod_base = OTHER; note = 2'-O-methyladenosine
  modified_base 4: mod_base = cm
  modified_base 5: mod_base = OTHER; note = 2'-fluoroguanosine
  modified_base 6: mod_base = um
  modified_base 7: mod_base = OTHER; note = 2'-fluoroguanosine
  modified_base 8: mod_base = gm
  modified_base 9: mod_base = OTHER; note = 2'-O-methyladenosine
  modified_base 10: mod_base = OTHER; note = 2'-O-methyladenosine
  modified_base 11: mod_base = gm
  modified_base 12: mod_base = OTHER; note = 2'-O-methyladenosine
  modified_base 13: mod_base = cm
  modified_base 14: mod_base = OTHER; note = 2'-fluoroguanosine
  modified_base 15: mod_base = cm
  modified_base 16: mod_base = OTHER; note = 2'-fluoroadenosine
  modified_base 17: mod_base = cm
  modified_base 18: mod_base = OTHER; note = 2'-O-methyladenosine
  modified_base 19: mod_base = OTHER; note = 2'-O-methyladenosine
  modified_base 20: mod_base = cm
  modified_base 21: mod_base = OTHER; note = 2'-O-methyluridine with a 3'-phosphorothioate linkage
  modified_base 22: mod_base = OTHER; note = 2'-O-methylguanosine with a 3'-phosphorothioate linkage
  modified_base 23: mod_base = gm
tcacgtggaagacgcacaactgg

SEQ ID NO: 1694 - RNA, 21 nt, synthetic construct
  source 1..21: mol_type = other RNA
  modified_base 1: mod_base = OTHER; note = 2'-O-methyluridine with a 3'-phosphorothioate linkage
  modified_base 2: mod_base = OTHER; note = 2'-O-methyluridine with a 3'-phosphorothioate linkage
  modified_base 3: mod_base = gm
  modified_base 4: mod_base = um
  modified_base 5: mod_base = gm
  modified_base 6: mod_base = OTHER; note = 2'-O-methyladenosine
  modified_base 7: mod_base = cm
  modified_base 8: mod_base = um
  modified_base 9: mod_base = OTHER; note = 2'-fluorocytidine
  modified_base 10: mod_base = OTHER; note = 2'-fluorouridine
  modified_base 11: mod_base = OTHER; note = 2'-fluoroguanosine
  modified_base 12: mod_base = cm
  modified_base 13: mod_base = OTHER; note = 2'-O-methyladenosine
  modified_base 14: mod_base = gm
  modified_base 15: mod_base = OTHER; note = 2'-O-methyladenosine
  modified_base 16: mod_base = OTHER; note = 2'-O-methyladenosine
  modified_base 17: mod_base = gm
  modified_base 18: mod_base = um
  modified_base 19: mod_base = OTHER; note = 2'-O-methylguanosine with a 3'-phosphorothioate linkage
  modified_base 20: mod_base = OTHER; note = 2'-O-methyladenosine with a 3'-phosphorothioate linkage
  modified_base 21: mod_base = OTHER; note = 2'-O-methyladenosine
ttgtgactctgcagaagtgaa

SEQ ID NO: 1695 - RNA, 23 nt, synthetic construct
  source 1..23: mol_type = other RNA
  modified_base 1: mod_base = OTHER; note = 2'-O-methyluridine with a 3'-phosphorothioate linkage and a 5'-phosphate substitution
  modified_base 2: mod_base = OTHER; note = 2'-fluorouridine with a 3'-phosphorothioate linkage
  modified_base 3: mod_base = cm
  modified_base 4: mod_base = OTHER; note = 2'-O-methyladenosine
  modified_base 5: mod_base = OTHER; note = 2'-fluorocytidine
  modified_base 6: mod_base = um
  modified_base 7: mod_base = OTHER; note = 2'-fluorouridine
  modified_base 8: mod_base = cm
  modified_base 9: mod_base = um
  modified_base 10: mod_base = gm
  modified_base 11: mod_base = cm
  modified_base 12: mod_base = OTHER; note = 2'-O-methyladenosine
  modified_base 13: mod_base = gm
  modified_base 14: mod_base = OTHER; note = 2'-fluoroadenosine
  modified_base 15: mod_base = gm
  modified_base 16: mod_base = OTHER; note = 2'-fluorouridine
  modified_base 17: mod_base = cm
  modified_base 18: mod_base = OTHER; note = 2'-O-methyladenosine
  modified_base 19: mod_base = cm
  modified_base 20: mod_base = OTHER; note = 2'-O-methyladenosine
  modified_base 21: mod_base = OTHER; note = 2'-O-methyladenosine with a 3'-phosphorothioate linkage
  modified_base 22: mod_base = OTHER; note = 2'-O-methylguanosine with a 3'-phosphorothioate linkage
  modified_base 23: mod_base = cm
ttcacttctgcagagtcacaagc

SEQ ID NO: 1696 - RNA, 21 nt, synthetic construct
  source 1..21: mol_type = other RNA
  modified_base 1: mod_base = OTHER; note = 2'-O-methylcytidine with a 3'-phosphorothioate linkage
  modified_base 2: mod_base = OTHER; note = 2'-O-methyluridine with a 3'-phosphorothioate linkage
  modified_base 3: mod_base = gm
  modified_base 4: mod_base = OTHER; note = 2'-O-methyladenosine
  modified_base 5: mod_base = OTHER; note = 2'-O-methyladenosine
  modified_base 6: mod_base = gm
  modified_base 7: mod_base = gm
  modified_base 8: mod_base = gm
  modified_base 9: mod_base = OTHER; note = 2'-fluorouridine
  modified_base 10: mod_base = OTHER; note = 2'-fluorouridine
  modified_base 11: mod_base = OTHER; note = 2'-fluorocytidine
  modified_base 12: mod_base = gm
  modified_base 13: mod_base = cm
  modified_base 14: mod_base = OTHER; note = 2'-O-methyladenosine
  modified_base 15: mod_base = gm
  modified_base 16: mod_base = um
  modified_base 17: mod_base = gm
  modified_base 18: mod_base = OTHER; note = 2'-O-methyladenosine
  modified_base 19: mod_base = OTHER; note = 2'-O-methyluridine with a 3'-phosphorothioate linkage
  modified_base 20: mod_base = OTHER; note = 2'-O-methyladenosine with a 3'-phosphorothioate linkage
  modified_base 21: mod_base = OTHER; note = 2'-O-methyladenosine
ctgaagggttcgcagtgataa

SEQ ID NO: 1697 - RNA, 23 nt, synthetic construct
  source 1..23: mol_type = other RNA
  modified_base 1: mod_base = OTHER; note = 2'-O-methyluridine with a 3'-phosphorothioate linkage and a 5'-phosphate substitution
  modified_base 2: mod_base = OTHER; note = 2'-fluorouridine with a 3'-phosphorothioate linkage
  modified_base 3: mod_base = OTHER; note = 2'-O-methyladenosine
  modified_base 4: mod_base = um
  modified_base 5: mod_base = OTHER; note = 2'-fluorocytidine
  modified_base 6: mod_base = OTHER; note = 2'-O-methyladenosine
  modified_base 7: mod_base = OTHER; note = 2'-fluorocytidine
  modified_base 8: mod_base = um
  modified_base 9: mod_base = gm
  modified_base 10: mod_base = cm
  modified_base 11: mod_base = gm
  modified_base 12: mod_base = OTHER; note = 2'-O-methyladenosine
  modified_base 13: mod_base = OTHER; note = 2'-O-methyladenosine
  modified_base 14: mod_base = OTHER; note = 2'-fluorocytidine
  modified_base 15: mod_base = cm
  modified_base 16: mod_base = OTHER; note = 2'-fluorocytidine
  modified_base 17: mod_base = um
  modified_base 18: mod_base = um
  modified_base 19: mod_base = cm
  modified_base 20: mod_base = OTHER; note = 2'-O-methyladenosine
  modified_base 21: mod_base = OTHER; note = 2'-O-methylguanosine with a 3'-phosphorothioate linkage
  modified_base 22: mod_base = OTHER; note = 2'-O-methyladenosine with a 3'-phosphorothioate linkage
  modified_base 23: mod_base = um
ttatcactgcgaacccttcagat

SEQ ID NO: 1698 - RNA, 21 nt, synthetic construct
  source 1..21: mol_type = other RNA
  modified_base 1: mod_base = OTHER; note = 2'-O-methyluridine with a 3'-phosphorothioate linkage
  modified_base 2: mod_base = OTHER; note = 2'-O-methylguanosine with a 3'-phosphorothioate linkage
  modified_base 3: mod_base = OTHER; note = 2'-O-methyladenosine
  modified_base 4: mod_base = OTHER; note = 2'-O-methyladenosine
  modified_base 5: mod_base = gm
  modified_base 6: mod_base = gm
  modified_base 7: mod_base = gm
  modified_base 8: mod_base = um
  modified_base 9: mod_base = OTHER; note = 2'-fluorouridine
  modified_base 10: mod_base = OTHER; note = 2'-fluorocytidine
  modified_base 11: mod_base = OTHER; note = 2'-fluoroguanosine
  modified_base 12: mod_base = cm
  modified_base 13: mod_base = OTHER; note = 2'-O-methyladenosine
  modified_base 14: mod_base = gm
  modified_base 15: mod_base = um
  modified_base 16: mod_base = gm
  modified_base 17: mod_base = OTHER; note = 2'-O-methyladenosine
  modified_base 18: mod_base = um
  modified_base 19: mod_base = OTHER; note = 2'-O-methyladenosine with a 3'-phosphorothioate linkage
  modified_base 20: mod_base = OTHER; note = 2'-O-methyladenosine with a 3'-phosphorothioate linkage
  modified_base 21: mod_base = OTHER; note = 2'-O-methyladenosine
tgaagggttcgcagtgataaa

SEQ ID NO: 1699 - RNA, 23 nt, synthetic construct
  source 1..23: mol_type = other RNA
  modified_base 1: mod_base = OTHER; note = 2'-O-methyluridine with a 3'-phosphorothioate linkage and a 5'-phosphate substitution
  modified_base 2: mod_base = OTHER; note = 2'-fluorouridine with a 3'-phosphorothioate linkage
  modified_base 3: mod_base = um
  modified_base 4: mod_base = OTHER; note = 2'-O-methyladenosine
  modified_base 5: mod_base = OTHER; note = 2'-fluorouridine
  modified_base 6: mod_base = cm
  modified_base 7: mod_base = OTHER; note = 2'-fluoroadenosine
  modified_base 8: mod_base = cm
  modified_base 9: mod_base = um
  modified_base 10: mod_base = gm
  modified_base 11: mod_base = cm
  modified_base 12: mod_base = gm
  modified_base 13: mod_base = OTHER; note = 2'-O-methyladenosine
  modified_base 14: mod_base = OTHER; note = 2'-fluoroadenosine
  modified_base 15: mod_base = cm
  modified_base 16: mod_base = OTHER; note = 2'-fluorocytidine
  modified_base 17: mod_base = cm
  modified_base 18: mod_base = um
  modified_base 19: mod_base = um
  modified_base 20: mod_base = cm
  modified_base 21: mod_base = OTHER; note = 2'-O-methyladenosine with a 3'-phosphorothioate linkage
  modified_base 22: mod_base = OTHER; note = 2'-O-methylguanosine with a 3'-phosphorothioate linkage
  modified_base 23: mod_base = OTHER; note = 2'-O-methyladenosine
tttatcactgcgaacccttcaga

SEQ ID NO: 1700 - RNA, 21 nt, synthetic construct
  source 1..21: mol_type = other RNA
  modified_base 1: mod_base = OTHER; note = 2'-O-methylguanosine with a 3'-phosphorothioate linkage
  modified_base 2: mod_base = OTHER; note = 2'-O-methyladenosine with a 3'-phosphorothioate linkage
  modified_base 3: mod_base = OTHER; note = 2'-O-methyladenosine
  modified_base 4: mod_base = gm
  modified_base 5: mod_base = gm
  modified_base 6: mod_base = gm
  modified_base 7: mod_base = um
  modified_base 8: mod_base = um
  modified_base 9: mod_base = OTHER; note = 2'-fluorocytidine
  modified_base 10: mod_base = OTHER; note = 2'-fluoroguanosine
  modified_base 11: mod_base = OTHER; note = 2'-fluorocytidine
  modified_base 12: mod_base = OTHER; note = 2'-O-methyladenosine
  modified_base 13: mod_base = gm
  modified_base 14: mod_base = um
  modified_base 15: mod_base = gm
  modified_base 16: mod_base = OTHER; note = 2'-O-methyladenosine
  modified_base 17: mod_base = um
  modified_base 18: mod_base = OTHER; note = 2'-O-methyladenosine
  modified_base 19: mod_base = OTHER; note = 2'-O-methyladenosine with a 3'-phosphorothioate linkage
  modified_base 20: mod_base = OTHER; note = 2'-O-methyladenosine with a 3'-phosphorothioate linkage
  modified_base 21: mod_base = OTHER; note = 2'-O-methyladenosine
gaagggttcgcagtgataaaa

SEQ ID NO: 1701 - RNA, 23 nt, synthetic construct
  source 1..23: mol_type = other RNA
  modified_base 1: mod_base = OTHER; note = 2'-O-methyluridine with a 3'-phosphorothioate linkage and a 5'-phosphate substitution
  modified_base 2: mod_base = OTHER; note = 2'-fluorouridine with a 3'-phosphorothioate linkage
  modified_base 3: mod_base = um
  modified_base 4: mod_base = um
  modified_base 5: mod_base = OTHER; note = 2'-fluoroadenosine
  modified_base 6: mod_base = um
  modified_base 7: mod_base = OTHER; note = 2'-fluorocytidine
  modified_base 8: mod_base = OTHER; note = 2'-O-methyladenosine
  modified_base 9: mod_base = cm
  modified_base 10: mod_base = um
  modified_base 11: mod_base = gm
  modified_base 12: mod_base = cm
  modified_base 13: mod_base = gm
  modified_base 14: mod_base = OTHER; note = 2'-fluoroadenosine
  modified_base 15: mod_base = OTHER; note = 2'-O-methyladenosine
  modified_base 16: mod_base = OTHER; note = 2'-fluorocytidine
  modified_base 17: mod_base = cm
  modified_base 18: mod_base = cm
  modified_base 19: mod_base = um
  modified_base 20: mod_base = um
  modified_base 21: mod_base = OTHER; note = 2'-O-methylcytidine with a 3'-phosphorothioate linkage
  modified_base 22: mod_base = OTHER; note = 2'-O-methyladenosine with a 3'-phosphorothioate linkage
  modified_base 23: mod_base = gm
ttttatcactgcgaacccttcag

SEQ ID NO: 1702 - RNA, 21 nt, synthetic construct
  source 1..21: mol_type = other RNA
  modified_base 1: mod_base = OTHER; note = 2'-O-methyladenosine with a 3'-phosphorothioate linkage
  modified_base 2: mod_base = OTHER; note = 2'-O-methylguanosine with a 3'-phosphorothioate linkage
  modified_base 3: mod_base = gm
  modified_base 4: mod_base = gm
  modified_base 5: mod_base = um
  modified_base 6: mod_base = um
  modified_base 7: mod_base = cm
  modified_base 8: mod_base = gm
  modified_base 9: mod_base = OTHER; note = 2'-fluorocytidine
  modified_base 10: mod_base = OTHER; note = 2'-fluoroadenosine
  modified_base 11: mod_base = OTHER; note = 2'-fluoroguanosine
  modified_base 12: mod_base = um
  modified_base 13: mod_base = gm
  modified_base 14: mod_base = OTHER; note = 2'-O-methyladenosine
  modified_base 15: mod_base = um
  modified_base 16: mod_base = OTHER; note = 2'-O-methyladenosine
  modified_base 17: mod_base = OTHER; note = 2'-O-methyladenosine
  modified_base 18: mod_base = OTHER; note = 2'-O-methyladenosine
  modified_base 19: mod_base = OTHER; note = 2'-O-methylguanosine with a 3'-phosphorothioate linkage
  modified_base 20: mod_base = OTHER; note = 2'-O-methylguanosine with a 3'-phosphorothioate linkage
  modified_base 21: mod_base = OTHER; note = 2'-O-methyladenosine
agggttcgcagtgataaagga

SEQ ID NO: 1703 - RNA, 23 nt, synthetic construct
  source 1..23: mol_type = other RNA
  modified_base 1: mod_base = OTHER; note = 2'-O-methyluridine with a 3'-phosphorothioate linkage and a 5'-phosphate substitution
  modified_base 2: mod_base = OTHER; note = 2'-fluorocytidine with a 3'-phosphorothioate linkage
  modified_base 3: mod_base = cm
  modified_base 4: mod_base = um
  modified_base 5: mod_base = OTHER; note = 2'-fluorouridine
  modified_base 6: mod_base = um
  modified_base 7: mod_base = OTHER; note = 2'-fluoroadenosine
  modified_base 8: mod_base = um
  modified_base 9: mod_base = cm
  modified_base 10: mod_base = OTHER; note = 2'-O-methyladenosine
  modified_base 11: mod_base = cm
  modified_base 12: mod_base = um
  modified_base 13: mod_base = gm
  modified_base 14: mod_base = OTHER; note = 2'-fluorocytidine
  modified_base 15: mod_base = gm
  modified_base 16: mod_base = OTHER; note = 2'-fluoroadenosine
  modified_base 17: mod_base = OTHER; note = 2'-O-methyladenosine
  modified_base 18: mod_base = cm
  modified_base 19: mod_base = cm
  modified_base 20: mod_base = cm
  modified_base 21: mod_base = OTHER; note = 2'-O-methyluridine with a 3'-phosphorothioate linkage
  modified_base 22: mod_base = OTHER; note = 2'-O-methyluridine with a 3'-phosphorothioate linkage
  modified_base 23: mod_base = cm
tcctttatcactgcgaacccttc

SEQ ID NO: 1704 - RNA, 21 nt, synthetic construct
  source 1..21: mol_type = other RNA
  modified_base 1: mod_base = OTHER; note = 2'-O-methylguanosine with a 3'-phosphorothioate linkage
  modified_base 2: mod_base = OTHER; note = 2'-O-methylguanosine with a 3'-phosphorothioate linkage
  modified_base 3: mod_base = gm
  modified_base 4: mod_base = um
  modified_base 5: mod_base = um
  modified_base 6: mod_base = cm
  modified_base 7: mod_base = gm
  modified_base 8: mod_base = cm
  modified_base 9: mod_base = OTHER; note = 2'-fluoroadenosine
  modified_base 10: mod_base = OTHER; note = 2'-fluoroguanosine
  modified_base 11: mod_base = OTHER; note = 2'-fluorouridine
  modified_base 12: mod_base = gm
  modified_base 13: mod_base = OTHER; note = 2'-O-methyladenosine
  modified_base 14: mod_base = um
  modified_base 15: mod_base = OTHER; note = 2'-O-methyladenosine
  modified_base 16: mod_base = OTHER; note = 2'-O-methyladenosine
  modified_base 17: mod_base = OTHER; note = 2'-O-methyladenosine
  modified_base 18: mod_base = gm
  modified_base 19: mod_base = OTHER; note = 2'-O-methylguanosine with a 3'-phosphorothioate linkage
  modified_base 20: mod_base = OTHER; note = 2'-O-methyladenosine with a 3'-phosphorothioate linkage
  modified_base 21: mod_base = OTHER; note = 2'-O-methyladenosine
gggttcgcagtgataaaggaa

SEQ ID NO: 1705 - RNA, 23 nt, synthetic construct
  source 1..23: mol_type = other RNA
  modified_base 1: mod_base = OTHER; note = 2'-O-methyluridine with a 3'-phosphorothioate linkage and a 5'-phosphate substitution
  modified_base 2: mod_base = OTHER; note = 2'-fluorouridine with a 3'-phosphorothioate linkage
  modified_base 3: mod_base = cm
  modified_base 4: mod_base = cm
  modified_base 5: mod_base = OTHER; note = 2'-fluorouridine
  modified_base 6: mod_base = um
  modified_base 7: mod_base = OTHER; note = 2'-fluorouridine
  modified_base 8: mod_base = OTHER; note = 2'-O-methyladenosine
  modified_base 9: mod_base = um
  modified_base 10: mod_base = cm
  modified_base 11: mod_base = OTHER; note = 2'-O-methyladenosine
  modified_base 12: mod_base = cm
  modified_base 13: mod_base = um
  modified_base 14: mod_base = OTHER; note = 2'-fluoroguanosine
  modified_base 15: mod_base = cm
  modified_base 16: mod_base = OTHER; note = 2'-fluoroguanosine
  modified_base 17: mod_base = OTHER; note = 2'-O-methyladenosine
  modified_base 18: mod_base = OTHER; note = 2'-O-methyladenosine
  modified_base 19: mod_base = cm
  modified_base 20: mod_base = cm
  modified_base 21: mod_base = OTHER; note = 2'-O-methylcytidine with a 3'-phosphorothioate linkage
  modified_base 22: mod_base = OTHER; note = 2'-O-methyluridine with a 3'-phosphorothioate linkage
  modified_base 23: mod_base = um
ttcctttatcactgcgaaccctt

SEQ ID NO: 1706 - RNA, 21 nt, synthetic construct
  source 1..21: mol_type = other RNA
  modified_base 1: mod_base = OTHER; note = 2'-O-methyluridine with a 3'-phosphorothioate linkage
  modified_base 2: mod_base = OTHER; note = 2'-O-methyluridine with a 3'-phosphorothioate linkage
  modified_base 3: mod_base = cm
  modified_base 4: mod_base = gm
  modified_base 5: mod_base = cm
  modified_base 6: mod_base = OTHER; note = 2'-O-methyladenosine
  modified_base 7: mod_base = gm
  modified_base 8: mod_base = um
  modified_base 9: mod_base = OTHER; note = 2'-fluoroguanosine
  modified_base 10: mod_base = OTHER; note = 2'-fluoroadenosine
  modified_base 11: mod_base = OTHER; note = 2'-fluorouridine
  modified_base 12: mod_base = OTHER; note = 2'-O-methyladenosine
  modified_base 13: mod_base = OTHER; note = 2'-O-methyladenosine
  modified_base 14: mod_base = OTHER; note = 2'-O-methyladenosine
  modified_base 15: mod_base = gm
  modified_base 16: mod_base = gm
  modified_base 17: mod_base = OTHER; note = 2'-O-methyladenosine
  modified_base 18: mod_base = gm
  modified_base 19: mod_base = OTHER; note = 2'-O-methylguanosine with a 3'-phosphorothioate linkage
  modified_base 20: mod_base = OTHER; note = 2'-O-methylcytidine with a 3'-phosphorothioate linkage
  modified_base 21: mod_base = OTHER; note = 2'-O-methyladenosine
ttcgcagtgataaaggaggca

SEQ ID NO: 1707 - RNA, 23 nt, synthetic construct
  source 1..23: mol_type = other RNA
  modified_base 1: mod_base = OTHER; note = 2'-O-methyluridine with a 3'-phosphorothioate linkage and a 5'-phosphate substitution
  modified_base 2: mod_base = OTHER; note = 2'-fluoroguanosine with a 3'-phosphorothioate linkage
  modified_base 3: mod_base = cm
  modified_base 4: mod_base = cm
  modified_base 5: mod_base = OTHER; note = 2'-fluorouridine
  modified_base 6: mod_base = cm
  modified_base 7: mod_base = OTHER; note = 2'-fluorocytidine
  modified_base 8: mod_base = um
  modified_base 9: mod_base = um
  modified_base 10: mod_base = um
  modified_base 11: mod_base = OTHER; note = 2'-O-methyladenosine
  modified_base 12: mod_base = um
  modified_base 13: mod_base = cm
  modified_base 14: mod_base = OTHER; note = 2'-fluoroadenosine
  modified_base 15: mod_base = cm
  modified_base 16: mod_base = OTHER; note = 2'-fluorouridine
  modified_base 17: mod_base = gm
  modified_base 18: mod_base = cm
  modified_base 19: mod_base = gm
  modified_base 20: mod_base = OTHER; note = 2'-O-methyladenosine
  modified_base 21: mod_base = OTHER; note = 2'-O-methyladenosine with a 3'-phosphorothioate linkage
  modified_base 22: mod_base = OTHER; note = 2'-O-methylcytidine with a 3'-phosphorothioate linkage
  modified_base 23: mod_base = cm
tgcctcctttatcactgcgaacc

SEQ ID NO: 1708 - RNA, 21 nt, synthetic construct
  source 1..21: mol_type = other RNA
  modified_base 1: mod_base = OTHER; note = 2'-O-methylcytidine with a 3'-phosphorothioate linkage
  modified_base 2: mod_base = OTHER; note = 2'-O-methyladenosine with a 3'-phosphorothioate linkage
  modified_base 3: mod_base = gm
  modified_base 4: mod_base = um
  modified_base 5: mod_base = gm
  modified_base 6: mod_base = OTHER; note = 2'-O-methyladenosine
  modified_base 7: mod_base = um
  modified_base 8: mod_base = OTHER; note = 2'-O-methyladenosine
  modified_base 9: mod_base = OTHER; note = 2'-fluoroadenosine
  modified_base 10: mod_base = OTHER; note = 2'-fluoroadenosine
  modified_base 11: mod_base = OTHER; note = 2'-fluoroguanosine
  modified_base 12: mod_base = gm
  modified_base 13: mod_base = OTHER; note = 2'-O-methyladenosine
  modified_base 14: mod_base = gm
  modified_base 15: mod_base = gm
  modified_base 16: mod_base = cm
  modified_base 17: mod_base = OTHER; note = 2'-O-methyladenosine
  modified_base 18: mod_base = um
  modified_base 19: mod_base = OTHER; note = 2'-O-methyluridine with a 3'-phosphorothioate linkage
  modified_base 20: mod_base = OTHER; note = 2'-O-methyluridine with a 3'-phosphorothioate linkage
  modified_base 21: mod_base = OTHER; note = 2'-O-methyladenosine
cagtgataaaggaggcattta

SEQ ID NO: 1709 - RNA, 23 nt, synthetic construct
  source 1..23: mol_type = other RNA
  modified_base 1: mod_base = OTHER; note = 2'-O-methyluridine with a 3'-phosphorothioate linkage and a 5'-phosphate substitution
  modified_base 2: mod_base = OTHER; note = 2'-fluoroadenosine with a 3'-phosphorothioate linkage
  modified_base 3: mod_base = OTHER; note = 2'-O-methyladenosine
  modified_base 4: mod_base = OTHER; note = 2'-O-methyladenosine
  modified_base 5: mod_base = OTHER; note = 2'-fluorouridine
  modified_base 6: mod_base = gm
  modified_base 7: mod_base = OTHER; note = 2'-fluorocytidine
  modified_base 8: mod_base = cm
  modified_base 9: mod_base = um
  modified_base 10: mod_base = cm
  modified_base 11: mod_base = cm
  modified_base 12: mod_base = um
  modified_base 13: mod_base = um
  modified_base 14: mod_base = OTHER; note = 2'-fluorouridine
  modified_base 15: mod_base = OTHER; note = 2'-O-methyladenosine
  modified_base 16: mod_base = OTHER; note = 2'-fluorouridine
  modified_base 17: mod_base = cm
  modified_base 18: mod_base = OTHER; note = 2'-O-methyladenosine
  modified_base 19: mod_base = cm
  modified_base 20: mod_base = um
  modified_base 21: mod_base = OTHER; note = 2'-O-methylguanosine with a 3'-phosphorothioate linkage
  modified_base 22: mod_base = OTHER; note = 2'-O-methylcytidine with a 3'-phosphorothioate linkage
  modified_base 23: mod_base = gm
taaatgcctcctttatcactgcg

SEQ ID NO: 1710 - RNA, 21 nt, synthetic construct
  source 1..21: mol_type = other RNA
  modified_base 1: mod_base = OTHER; note = 2'-O-methylcytidine with a 3'-phosphorothioate linkage
  modified_base 2: mod_base = OTHER; note = 2'-O-methyluridine with a 3'-phosphorothioate linkage
  modified_base 3: mod_base = OTHER; note = 2'-O-methyladenosine
  modified_base 4: mod_base = gm
  modified_base 5: mod_base = cm
  modified_base 6: mod_base = OTHER; note = 2'-O-methyladenosine
  modified_base 7: mod_base = gm
  modified_base 8: mod_base = OTHER; note = 2'-O-methyladenosine
  modified_base 9: mod_base = OTHER; note = 2'-fluorouridine
  modified_base 10: mod_base = OTHER; note = 2'-fluorouridine
  modified_base 11: mod_base = OTHER; note = 2'-fluorouridine
  modified_base 12: mod_base = gm
  modified_base 13: mod_base = cm
  modified_base 14: mod_base = OTHER; note = 2'-O-methyladenosine
  modified_base 15: mod_base = cm
  modified_base 16: mod_base = gm
  modified_base 17: mod_base = um
  modified_base 18: mod_base = cm
  modified_base 19: mod_base = OTHER; note = 2'-O-methyluridine with a 3'-phosphorothioate linkage
  modified_base 20: mod_base = OTHER; note = 2'-O-methyladenosine with a 3'-phosphorothioate linkage
  modified_base 21: mod_base = OTHER; note = 2'-O-methyladenosine
ctagcagatttgcacgtctaa

SEQ ID NO: 1711 - RNA, 23 nt, synthetic construct
  source 1..23: mol_type = other RNA
  modified_base 1: mod_base = OTHER; note = 2'-O-methyluridine with a 3'-phosphorothioate linkage and a 5'-phosphate substitution
  modified_base 2: mod_base = OTHER; note = 2'-fluorouridine with a 3'-phosphorothioate linkage
  modified_base 3: mod_base = OTHER; note = 2'-O-methyladenosine
  modified_base 4: mod_base = gm
  modified_base 5: mod_base = OTHER; note = 2'-fluoroadenosine
  modified_base 6: mod_base = cm
  modified_base 7: mod_base = OTHER; note = 2'-fluoroguanosine
  modified_base 8: mod_base = um
  modified_base 9: mod_base = gm
  modified_base 10: mod_base = cm
  modified_base 11: mod_base = OTHER; note = 2'-O-methyladenosine
  modified_base 12: mod_base = OTHER; note = 2'-O-methyladenosine
  modified_base 13: mod_base = OTHER; note = 2'-O-methyladenosine
  modified_base 14: mod_base = OTHER; note = 2'-fluorouridine
  modified_base 15: mod_base = cm
  modified_base 16: mod_base = OTHER; note = 2'-fluorouridine
  modified_base 17: mod_base = gm
  modified_base 18: mod_base = cm
  modified_base 19: mod_base = um
  modified_base 20: mod_base = OTHER; note = 2'-O-methyladenosine
  modified_base 21: mod_base = OTHER; note = 2'-O-methylguanosine with a 3'-phosphorothioate linkage
  modified_base 22: mod_base = OTHER; note = 2'-O-methyluridine with a 3'-phosphorothioate linkage
  modified_base 23: mod_base = gm
ttagacgtgcaaatctgctagtg

SEQ ID NO: 1712 - RNA, 21 nt, synthetic construct
  source 1..21: mol_type = other RNA
  modified_base 1: mod_base = OTHER; note = 2'-O-methyluridine with a 3'-phosphorothioate linkage
  modified_base 2: mod_base = OTHER; note = 2'-O-methyladenosine with a 3'-phosphorothioate linkage
  modified_base 3: mod_base = gm
  modified_base 4: mod_base = cm
  modified_base 5: mod_base = OTHER; note = 2'-O-methyladenosine
  modified_base 6: mod_base = gm
  modified_base 7: mod_base = OTHER; note = 2'-O-methyladenosine
  modified_base 8: mod_base = um
  modified_base 9: mod_base = OTHER; note = 2'-fluorouridine
  modified_base 10: mod_base = OTHER; note = 2'-fluorouridine
  modified_base 11: mod_base = OTHER; note = 2'-fluoroguanosine
  modified_base 12: mod_base = cm
  modified_base 13: mod_base = OTHER; note = 2'-O-methyladenosine
  modified_base 14: mod_base = cm
  modified_base 15: mod_base = gm
  modified_base 16: mod_base = um
  modified_base 17: mod_base = cm
  modified_base 18: mod_base = um
  modified_base 19: mod_base = OTHER; note = 2'-O-methyladenosine with a 3'-phosphorothioate linkage
  modified_base 20: mod_base = OTHER; note = 2'-O-methylcytidine with a 3'-phosphorothioate linkage
  modified_base 21: mod_base = OTHER; note = 2'-O-methyladenosine
tagcagatttgcacgtctaca

SEQ ID NO: 1713 - RNA, 23 nt, synthetic construct
  source 1..23: mol_type = other RNA
  modified_base 1: mod_base = OTHER; note = 2'-O-methyluridine with a 3'-phosphorothioate linkage and a 5'-phosphate substitution
  modified_base 2: mod_base = OTHER; note = 2'-fluoroguanosine with a 3'-phosphorothioate linkage
  modified_base 3: mod_base = um
  modified_base 4: mod_base = OTHER; note = 2'-O-methyladenosine
  modified_base 5: mod_base = OTHER; note = 2'-fluoroguanosine
  modified_base 6: mod_base = OTHER; note = 2'-O-methyladenosine
  modified_base 7: mod_base = OTHER; note = 2'-fluorocytidine
  modified_base 8: mod_base = gm
  modified_base 9: mod_base = um
  modified_base 10: mod_base = gm
  modified_base 11: mod_base = cm
  modified_base 12: mod_base = OTHER; note = 2'-O-methyladenosine
  modified_base 13: mod_base = OTHER; note = 2'-O-methyladenosine
  modified_base 14: mod_base = OTHER; note = 2'-fluoroadenosine
  modified_base 15: mod_base = um
  modified_base 16: mod_base = OTHER; note = 2'-fluorocytidine
  modified_base 17: mod_base = um
  modified_base 18: mod_base = gm
  modified_base 19: mod_base = cm
  modified_base 20: mod_base = um
  modified_base 21: mod_base = OTHER; note = 2'-O-methyladenosine with a 3'-phosphorothioate linkage
  modified_base 22: mod_base = OTHER; note = 2'-O-methylguanosine with a 3'-phosphorothioate linkage
  modified_base 23: mod_base = um
tgtagacgtgcaaatctgctagt

SEQ ID NO: 1714 - RNA, 21 nt, synthetic construct
  source 1..21: mol_type = other RNA
  modified_base 1: mod_base = OTHER; note = 2'-O-methyladenosine with a 3'-phosphorothioate linkage
  modified_base 2: mod_base = OTHER; note = 2'-O-methylguanosine with a 3'-phosphorothioate linkage
  modified_base 3: mod_base = cm
  modified_base 4: mod_base = OTHER; note = 2'-O-methyladenosine
  modified_base 5: mod_base = gm
  modified_base 6: mod_base = OTHER; note = 2'-O-methyladenosine
  modified_base 7: mod_base = um
  modified_base 8: mod_base = um
  modified_base 9: mod_base = OTHER; note = 2'-fluorouridine
  modified_base 10: mod_base = OTHER; note = 2'-fluoroguanosine
  modified_base 11: mod_base = OTHER; note = 2'-fluorocytidine
  modified_base 12: mod_base = OTHER; note = 2'-O-methyladenosine
  modified_base 13: mod_base = cm
  modified_base 14: mod_base = gm
  modified_base 15: mod_base = um
  modified_base 16: mod_base = cm
  modified_base 17: mod_base = um
  modified_base 18: mod_base = OTHER; note = 2'-O-methyladenosine
  modified_base 19: mod_base = OTHER; note = 2'-O-methylcytidine with a 3'-phosphorothioate linkage
  modified_base 20: mod_base = OTHER; note = 2'-O-methyladenosine with a 3'-phosphorothioate linkage
  modified_base 21: mod_base = OTHER; note = 2'-O-methyladenosine
agcagatttgcacgtctacaa

SEQ ID NO: 1715 - RNA, 23 nt, synthetic construct
  source 1..23: mol_type = other RNA
  modified_base 1: mod_base = OTHER; note = 2'-O-methyluridine with a 3'-phosphorothioate linkage and a 5'-phosphate substitution
  modified_base 2: mod_base = OTHER; note = 2'-fluorouridine with a 3'-phosphorothioate linkage
  modified_base 3: mod_base = gm
  modified_base 4: mod_base = um
  modified_base 5: mod_base = OTHER; note = 2'-fluoroadenosine
  modified_base 6: mod_base = gm
  modified_base 7: mod_base = OTHER; note = 2'-fluoroadenosine
  modified_base 8: mod_base = cm
  modified_base 9: mod_base = gm
  modified_base 10: mod_base = um
  modified_base 11: mod_base = gm
  modified_base 12: mod_base = cm
  modified_base 13: mod_base = OTHER; note = 2'-O-methyladenosine
  modified_base 14: mod_base = OTHER; note = 2'-fluoroadenosine
  modified_base 15: mod_base = OTHER; note = 2'-O-methyladenosine
  modified_base 16: mod_base = OTHER; note = 2'-fluorouridine
  modified_base 17: mod_base = cm
  modified_base 18: mod_base = um
  modified_base 19: mod_base = gm
  modified_base 20: mod_base = cm
  modified_base 21: mod_base = OTHER; note = 2'-O-methyluridine with a 3'-phosphorothioate linkage
  modified_base 22: mod_base = OTHER; note = 2'-O-methyladenosine with a 3'-phosphorothioate linkage
  modified_base 23: mod_base = gm
ttgtagacgtgcaaatctgctag

SEQ ID NO: 1716 - RNA, 21 nt, synthetic construct
  source 1..21: mol_type = other RNA
  modified_base 1: mod_base = OTHER; note = 2'-O-methylguanosine with a 3'-phosphorothioate linkage
  modified_base 2: mod_base = OTHER; note = 2'-O-methylcytidine with a 3'-phosphorothioate linkage
  modified_base 3: mod_base = OTHER; note = 2'-O-methyladenosine
  modified_base 4: mod_base = gm
  modified_base 5: mod_base = OTHER; note = 2'-O-methyladenosine
  modified_base 6: mod_base = um
  modified_base 7: mod_base = um
  modified_base 8: mod_base = um
  modified_base 9: mod_base = OTHER; note = 2'-fluoroguanosine
  modified_base 10: mod_base = OTHER; note = 2'-fluorocytidine
  modified_base 11: mod_base = OTHER; note = 2'-fluoroadenosine
  modified_base 12: mod_base = cm
  modified_base 13: mod_base = gm
  modified_base 14: mod_base = um
  modified_base 15: mod_base = cm
  modified_base 16: mod_base = um
  modified_base 17: mod_base = OTHER; note = 2'-O-methyladenosine
  modified_base 18: mod_base = cm
  modified_base 19: mod_base = OTHER; note = 2'-O-methyladenosine with a 3'-phosphorothioate linkage
  modified_base 20: mod_base = OTHER; note = 2'-O-methylguanosine with a 3'-phosphorothioate linkage
  modified_base 21: mod_base = OTHER; note = 2'-O-methyladenosine
gcagatttgcacgtctacaga

SEQ ID NO: 1717 - RNA, 23 nt, synthetic construct
  source 1..23: mol_type = other RNA
  modified_base 1: mod_base = OTHER; note = 2'-O-methyluridine with a 3'-phosphorothioate linkage and a 5'-phosphate substitution
  modified_base 2: mod_base = OTHER; note = 2'-fluorocytidine with a 3'-phosphorothioate linkage
  modified_base 3: mod_base = um
  modified_base 4: mod_base = gm
  modified_base 5: mod_base = OTHER; note = 2'-fluorouridine
  modified_base 6: mod_base = OTHER; note = 2'-O-methyladenosine
  modified_base 7: mod_base = OTHER; note = 2'-fluoroguanosine
  modified_base 8: mod_base = OTHER; note = 2'-O-methyladenosine
  modified_base 9: mod_base = cm
  modified_base 10: mod_base = gm
  modified_base 11: mod_base = um
  modified_base 12: mod_base = gm
  modified_base 13: mod_base = cm
  modified_base 14: mod_base = OTHER; note = 2'-fluoroadenosine
  modified_base 15: mod_base = OTHER; note = 2'-O-methyladenosine
  modified_base 16: mod_base = OTHER; note = 2'-fluoroadenosine
  modified_base 17: mod_base = um
  modified_base 18: mod_base = cm
  modified_base 19: mod_base = um
  modified_base 20: mod_base = gm
  modified_base 21: mod_base = OTHER; note = 2'-O-methylcytidine with a 3'-phosphorothioate linkage
  modified_base 22: mod_base = OTHER; note = 2'-O-methyluridine with a 3'-phosphorothioate linkage
  modified_base 23: mod_base = OTHER; note = 2'-O-methyladenosine
tctgtagacgtgcaaatctgcta

SEQ ID NO: 1718 - RNA, 21 nt, synthetic construct
  source 1..21: mol_type = other RNA
  modified_base 1: mod_base = OTHER; note = 2'-O-methylcytidine with a 3'-phosphorothioate linkage
  modified_base 2: mod_base = OTHER; note = 2'-O-methyladenosine with a 3'-phosphorothioate linkage
  modified_base 3: mod_base = gm
  modified_base 4: mod_base = OTHER; note = 2'-O-methyladenosine
  modified_base 5: mod_base = um
  modified_base 6: mod_base = um
  modified_base 7: mod_base = um
  modified_base 8: mod_base = gm
  modified_base 9: mod_base = OTHER; note = 2'-fluorocytidine
  modified_base 10: mod_base = OTHER; note = 2'-fluoroadenosine
  modified_base 11: mod_base = OTHER; note = 2'-fluorocytidine
  modified_base 12: mod_base = gm
  modified_base 13: mod_base = um
  modified_base 14: mod_base = cm
  modified_base 15: mod_base = um
  modified_base 16: mod_base = OTHER; note = 2'-O-methyladenosine
  modified_base 17: mod_base = cm
  modified_base 18: mod_base = OTHER; note = 2'-O-methyladenosine
  modified_base 19: mod_base = OTHER; note = 2'-O-methylguanosine with a 3'-phosphorothioate linkage
  modified_base 20: mod_base = OTHER; note = 2'-O-methyladenosine with a 3'-phosphorothioate linkage
  modified_base 21: mod_base = OTHER; note = 2'-O-methyladenosine
cagatttgcacgtctacagaa

SEQ ID NO: 1719 - RNA, 23 nt, synthetic construct
  source 1..23: mol_type = other RNA
  modified_base 1: mod_base = OTHER; note = 2'-O-methyluridine with a 3'-phosphorothioate linkage and a 5'-phosphate substitution
  modified_base 2: mod_base = OTHER; note = 2'-fluorouridine with a 3'-phosphorothioate linkage
  modified_base 3: mod_base = cm
  modified_base 4: mod_base = um
  modified_base 5: mod_base = OTHER; note = 2'-fluoroguanosine
  modified_base 6: mod_base = um
  modified_base 7: mod_base = OTHER; note = 2'-fluoroadenosine
  modified_base 8: mod_base = gm
  modified_base 9: mod_base = OTHER; note = 2'-O-methyladenosine
  modified_base 10: mod_base = cm
  modified_base 11: mod_base = gm
  modified_base 12: mod_base = um
  modified_base 13: mod_base = gm
  modified_base 14: mod_base = OTHER; note = 2'-fluorocytidine
  modified_base 15: mod_base = OTHER; note = 2'-O-methyladenosine
  modified_base 16: mod_base = OTHER; note = 2'-fluoroadenosine
  modified_base 17: mod_base = OTHER; note = 2'-O-methyladenosine
  modified_base 18: mod_base = um
  modified_base 19: mod_base = cm
  modified_base 20: mod_base = um
  modified_base 21: mod_base = OTHER; note = 2'-O-methylguanosine with a 3'-phosphorothioate linkage
  modified_base 22: mod_base = OTHER; note = 2'-O-methylcytidine with a 3'-phosphorothioate linkage
  modified_base 23: mod_base = um
ttctgtagacgtgcaaatctgct

SEQ ID NO: 1720 - RNA, 21 nt, synthetic construct
  source 1..21: mol_type = other RNA
  modified_base 1: mod_base = OTHER; note = 2'-O-methylguanosine with a 3'-phosphorothioate linkage
  modified_base 2: mod_base = OTHER; note = 2'-O-methyladenosine with a 3'-phosphorothioate linkage
  modified_base 3: mod_base = um
  modified_base 4: mod_base = um
  modified_base 5: mod_base = um
  modified_base 6: mod_base = gm
  modified_base 7: mod_base = cm
  modified_base 8: mod_base = OTHER; note = 2'-O-methyladenosine
  modified_base 9: mod_base = OTHER; note = 2'-fluorocytidine
  modified_base 10: mod_base = OTHER; note = 2'-fluoroguanosine
  modified_base 11: mod_base = OTHER; note = 2'-fluorouridine
  modified_base 12: mod_base = cm
  modified_base 13: mod_base = um
  modified_base 14: mod_base = OTHER; note = 2'-O-methyladenosine
  modified_base 15: mod_base = cm
  modified_base 16: mod_base = OTHER; note = 2'-O-methyladenosine
  modified_base 17: mod_base = gm
  modified_base 18: mod_base = OTHER; note = 2'-O-methyladenosine
  modified_base 19: mod_base = OTHER; note = 2'-O-methyladenosine with a 3'-phosphorothioate linkage
  modified_base 20: mod_base = OTHER; note = 2'-O-methyladenosine with a 3'-phosphorothioate linkage
  modified_base 21: mod_base = OTHER; note = 2'-O-methyladenosine
gatttgcacgtctacagaaaa

SEQ ID NO: 1721 - RNA, 23 nt, synthetic construct
  source 1..23: mol_type = other RNA
  modified_base 1: mod_base = OTHER; note = 2'-O-methyluridine with a 3'-phosphorothioate linkage and a 5'-phosphate substitution
  modified_base 2: mod_base = OTHER; note = 2'-fluorouridine with a 3'-phosphorothioate linkage
  modified_base 3: mod_base = um
  modified_base 4: mod_base = um
  modified_base 5: mod_base = OTHER; note = 2'-fluorocytidine
  modified_base 6: mod_base = um
  modified_base 7: mod_base = OTHER; note = 2'-fluoroguanosine
  modified_base 8: mod_base = um
  modified_base 9: mod_base = OTHER; note = 2'-O-methyladenosine
  modified_base 10: mod_base = gm
  modified_base 11: mod_base = OTHER; note = 2'-O-methyladenosine
  modified_base 12: mod_base = cm
  modified_base 13: mod_base = gm
  modified_base 14: mod_base = OTHER; note = 2'-fluorouridine
  modified_base 15: mod_base = gm
  modified_base 16: mod_base = OTHER; note = 2'-fluorocytidine
  modified_base 17: mod_base = OTHER; note = 2'-O-methyladenosine
  modified_base 18: mod_base = OTHER; note = 2'-O-methyladenosine
  modified_base 19: mod_base = OTHER; note = 2'-O-methyladenosine
  modified_base 20: mod_base = um
  modified_base 21: mod_base = OTHER; note = 2'-O-methylcytidine with a 3'-phosphorothioate linkage
  modified_base 22: mod_base = OTHER; note = 2'-O-methyluridine with a 3'-phosphorothioate linkage
  modified_base 23: mod_base = gm
ttttctgtagacgtgcaaatctg

SEQ ID NO: 1722 - RNA, 21 nt, synthetic construct
  source 1..21: mol_type = other RNA
  modified_base 1: mod_base = OTHER; note = 2'-O-methyladenosine with a 3'-phosphorothioate linkage
  modified_base 2: mod_base = OTHER; note = 2'-O-methyluridine with a 3'-phosphorothioate linkage
  modified_base 3: mod_base = um
  modified_base 4: mod_base = um
  modified_base 5: mod_base = gm
  modified_base 6: mod_base = cm
  modified_base 7: mod_base = OTHER; note = 2'-O-methyladenosine
  modified_base 8: mod_base = cm
  modified_base 9: mod_base = OTHER; note = 2'-fluoroguanosine
  modified_base 10: mod_base = OTHER; note = 2'-fluorouridine
  modified_base 11: mod_base = OTHER; note = 2'-fluorocytidine
  modified_base 12: mod_base = um
  modified_base 13: mod_base = OTHER; note = 2'-O-methyladenosine
  modified_base 14: mod_base = cm
  modified_base 15: mod_base = OTHER; note = 2'-O-methyladenosine
  modified_base 16: mod_base = gm
  modified_base 17: mod_base = OTHER; note = 2'-O-methyladenosine
  modified_base 18: mod_base = OTHER; note = 2'-O-methyladenosine
  modified_base 19: mod_base = OTHER; note = 2'-O-methyladenosine with a 3'-phosphorothioate linkage
  modified_base 20: mod_base = OTHER; note = 2'-O-methylcytidine with a 3'-phosphorothioate linkage
  modified_base 21: mod_base = OTHER; note = 2'-O-methyladenosine
atttgcacgtctacagaaaca

SEQ ID NO: 1723 - RNA, 23 nt, synthetic construct
  source 1..23: mol_type = other RNA
  modified_base 1: mod_base = OTHER; note = 2'-O-methyluridine with a 3'-phosphorothioate linkage and a 5'-phosphate substitution
  modified_base 2: mod_base = OTHER; note = 2'-fluoroguanosine with a 3'-phosphorothioate linkage
  modified_base 3: mod_base = um
  modified_base 4: mod_base = um
  modified_base 5: mod_base = OTHER; note = 2'-fluorouridine
  modified_base 6: mod_base = cm
  modified_base 7: mod_base = OTHER; note = 2'-fluorouridine
  modified_base 8: mod_base = gm
  modified_base 9: mod_base = um
  modified_base 10: mod_base = OTHER; note = 2'-O-methyladenosine
  modified_base 11: mod_base = gm
  modified_base 12: mod_base = OTHER; note = 2'-O-methyladenosine
  modified_base 13: mod_base = cm
  modified_base 14: mod_base = OTHER; note = 2'-fluoroguanosine
  modified_base 15: mod_base = um
  modified_base 16: mod_base = OTHER; note = 2'-fluoroguanosine
  modified_base 17: mod_base = cm
  modified_base 18: mod_base = OTHER; note = 2'-O-methyladenosine
  modified_base 19: mod_base = OTHER; note = 2'-O-methyladenosine
  modified_base 20: mod_base = OTHER; note = 2'-O-methyladenosine
  modified_base 21: mod_base = OTHER; note = 2'-O-methyluridine with a 3'-phosphorothioate linkage
  modified_base 22: mod_base = OTHER; note = 2'-O-methylcytidine with a 3'-phosphorothioate linkage
  modified_base 23: mod_base = um
tgtttctgtagacgtgcaaatct

SEQ ID NO: 1724 - RNA, 21 nt, synthetic construct
  source 1..21: mol_type = other RNA
  modified_base 1: mod_base = OTHER; note = 2'-O-methylcytidine with a 3'-phosphorothioate linkage
  modified_base 2: mod_base = OTHER; note = 2'-O-methyluridine with a 3'-phosphorothioate linkage
  modified_base 3: mod_base = gm
  modified_base 4: mod_base = gm
  modified_base 5: mod_base = OTHER; note = 2'-O-methyladenosine
  modified_base 6: mod_base = cm
  modified_base 7: mod_base = gm
  modified_base 8: mod_base = cm
  modified_base 9: mod_base = OTHER; note = 2'-fluoroadenosine
  modified_base 10: mod_base = OTHER; note = 2'-fluoroadenosine
  modified_base 11: mod_base = OTHER; note = 2'-fluorocytidine
  modified_base 12: mod_base = cm
  modified_base 13: mod_base = um
  modified_base 14: mod_base = um
  modified_base 15: mod_base = um
  modified_base 16: mod_base = OTHER; note = 2'-O-methyladenosine
  modified_base 17: mod_base = um
  modified_base 18: mod_base = OTHER; note = 2'-O-methyladenosine
  modified_base 19: mod_base = OTHER; note = 2'-O-methyluridine with a 3'-phosphorothioate linkage
  modified_base 20: mod_base = OTHER; note = 2'-O-methylcytidine with a 3'-phosphorothioate linkage
  modified_base 21: mod_base = OTHER; note = 2'-O-methyladenosine
ctggacgcaacctttatatca

SEQ ID NO: 1725 - RNA, 23 nt, synthetic construct
  source 1..23: mol_type = other RNA
  modified_base 1: mod_base = OTHER; note = 2'-O-methyluridine with a 3'-phosphorothioate linkage and a 5'-phosphate substitution
  modified_base 2: mod_base = OTHER; note = 2'-fluoroguanosine with a 3'-phosphorothioate linkage
  modified_base 3: mod_base = OTHER; note = 2'-O-methyladenosine
  modified_base 4: mod_base = um
  modified_base 5: mod_base = OTHER; note = 2'-fluoroadenosine
  modified_base 6: mod_base = um
  modified_base 7: mod_base = OTHER; note = 2'-fluoroadenosine
  modified_base 8: mod_base = OTHER; note = 2'-O-methyladenosine
  modified_base 9: mod_base = OTHER; note = 2'-O-methyladenosine
  modified_base 10: mod_base = gm
  modified_base 11: mod_base = gm
  modified_base 12: mod_base = um
  modified_base 13: mod_base = um
  modified_base 14: mod_base = OTHER; note = 2'-fluoroguanosine
  modified_base 15: mod_base = cm
  modified_base 16: mod_base = OTHER; note = 2'-fluoroguanosine
  modified_base 17: mod_base = um
  modified_base 18: mod_base = cm
  modified_base 19: mod_base = cm
  modified_base 20: mod_base = OTHER; note = 2'-O-methyladenosine
  modified_base 21: mod_base = OTHER; note = 2'-O-methylguanosine with a 3'-phosphorothioate linkage
  modified_base 22: mod_base = OTHER; note = 2'-O-methylcytidine with a 3'-phosphorothioate linkage
  modified_base 23: mod_base = um
tgatataaaggttgcgtccagct

SEQ ID NO: 1726 - RNA, 21 nt, synthetic construct
  source 1..21: mol_type = other RNA
  modified_base 1: mod_base = OTHER; note = 2'-O-methyluridine with a 3'-phosphorothioate linkage
  modified_base 2: mod_base = OTHER; note = 2'-O-methylguanosine with a 3'-phosphorothioate linkage
  modified_base 3: mod_base = gm
  modified_base 4: mod_base = OTHER; note = 2'-O-methyladenosine
  modified_base 5: mod_base = cm
  modified_base 6: mod_base = gm
  modified_base 7: mod_base = cm
  modified_base 8: mod_base = OTHER; note = 2'-O-methyladenosine
  modified_base 9: mod_base = OTHER; note = 2'-fluoroadenosine
  modified_base 10: mod_base = OTHER; note = 2'-fluorocytidine
  modified_base 11: mod_base = OTHER; note = 2'-fluorocytidine
  modified_base 12: mod_base = um
  modified_base 13: mod_base = um
  modified_base 14: mod_base = um
  modified_base 15: mod_base = OTHER; note = 2'-O-methyladenosine
  modified_base 16: mod_base = um
  modified_base 17: mod_base = OTHER; note = 2'-O-methyladenosine
  modified_base 18: mod_base = um
  modified_base 19: mod_base = OTHER; note = 2'-O-methylcytidine with a 3'-phosphorothioate linkage
  modified_base 20: mod_base = OTHER; note = 2'-O-methylcytidine with a 3'-phosphorothioate linkage
  modified_base 21: mod_base = OTHER; note = 2'-O-methyladenosine
tggacgcaacctttatatcca

SEQ ID NO: 1727 - RNA, 23 nt, synthetic construct
  source 1..23: mol_type = other RNA
  modified_base 1: mod_base = OTHER; note = 2'-O-methyluridine with a 3'-phosphorothioate linkage and a 5'-phosphate substitution
  modified_base 2: mod_base = OTHER; note = 2'-fluoroguanosine with a 3'-phosphorothioate linkage
  modified_base 3: mod_base = gm
  modified_base 4: mod_base = OTHER; note = 2'-O-methyladenosine
  modified_base 5: mod_base = OTHER; note = 2'-fluorouridine
  modified_base 6: mod_base = OTHER; note = 2'-O-methyladenosine
  modified_base 7: mod_base = OTHER; note = 2'-fluorouridine
  modified_base 8: mod_base = OTHER; note = 2'-O-methyladenosine
  modified_base 9: mod_base = OTHER; note = 2'-O-methyladenosine
  modified_base 10: mod_base = OTHER; note = 2'-O-methyladenosine
  modified_base 11: mod_base = gm
  modified_base 12: mod_base = gm
  modified_base 13: mod_base = um
  modified_base 14: mod_base = OTHER; note = 2'-fluorouridine
  modified_base 15: mod_base = gm
  modified_base 16: mod_base = OTHER; note = 2'-fluorocytidine
  modified_base 17: mod_base = gm
  modified_base 18: mod_base = um
  modified_base 19: mod_base = cm
  modified_base 20: mod_base = cm
  modified_base 21: mod_base = OTHER; note = 2'-O-methyladenosine with a 3'-phosphorothioate linkage
  modified_base 22: mod_base = OTHER; note = 2'-O-methylguanosine with a 3'-phosphorothioate linkage
  modified_base 23: mod_base = cm
tggatataaaggttgcgtccagc

SEQ ID NO: 1728 - RNA, 21 nt, synthetic construct
  source 1..21: mol_type = other RNA
  modified_base 1: mod_base = OTHER; note = 2'-O-methylguanosine with a 3'-phosphorothioate linkage
  modified_base 2: mod_base = OTHER; note = 2'-O-methylguanosine with a 3'-phosphorothioate linkage
  modified_base 3: mod_base = OTHER; note = 2'-O-methyladenosine
  modified_base 4: mod_base = cm
  modified_base 5: mod_base = gm
  modified_base 6: mod_base = cm
  modified_base 7: mod_base = OTHER; note = 2'-O-methyladenosine
  modified_base 8: mod_base = OTHER; note = 2'-O-methyladenosine
  modified_base 9: mod_base = OTHER; note = 2'-fluorocytidine
  modified_base 10: mod_base = OTHER; note = 2'-fluorocytidine
  modified_base 11: mod_base = OTHER; note = 2'-fluorouridine
  modified_base 12: mod_base = um
  modified_base 13: mod_base = um
  modified_base 14: mod_base = OTHER; note = 2'-O-methyladenosine
  modified_base 15: mod_base = um
  modified_base 16: mod_base = OTHER; note = 2'-O-methyladenosine
  modified_base 17: mod_base = um
  modified_base 18: mod_base = cm
  modified_base 19: mod_base = OTHER; note = 2'-O-methylcytidine with a 3'-phosphorothioate linkage
  modified_base 20: mod_base = OTHER; note = 2'-O-methylguanosine with a 3'-phosphorothioate linkage
  modified_base 21: mod_base = OTHER; note = 2'-O-methyladenosine
ggacgcaacctttatatccga

SEQ ID NO: 1729 - RNA, 23 nt, synthetic construct
  source 1..23: mol_type = other RNA
  modified_base 1: mod_base = OTHER; note = 2'-O-methyluridine with a 3'-phosphorothioate linkage and a 5'-phosphate substitution
  modified_base 2: mod_base = OTHER; note = 2'-fluorocytidine with a 3'-phosphorothioate linkage
  modified_base 3: mod_base = gm
  modified_base 4: mod_base = gm
  modified_base 5: mod_base = OTHER; note = 2'-fluoroadenosine
  modified_base 6: mod_base = um
  modified_base 7: mod_base = OTHER; note = 2'-fluoroadenosine
  modified_base 8: mod_base = um
  modified_base 9: mod_base = OTHER; note = 2'-O-methyladenosine
  modified_base 10: mod_base = OTHER; note = 2'-O-methyladenosine
  modified_base 11: mod_base = OTHER; note = 2'-O-methyladenosine
  modified_base 12: mod_base = gm
  modified_base 13: mod_base = gm
  modified_base 14: mod_base = OTHER; note = 2'-fluorouridine
  modified_base 15: mod_base = um
  modified_base 16: mod_base = OTHER; note = 2'-fluoroguanosine
  modified_base 17: mod_base = cm
  modified_base 18: mod_base = gm
  modified_base 19: mod_base = um
  modified_base 20: mod_base = cm
  modified_base 21: mod_base = OTHER; note = 2'-O-methylcytidine with a 3'-phosphorothioate linkage
  modified_base 22: mod_base = OTHER; note = 2'-O-methyladenosine with a 3'-phosphorothioate linkage
  modified_base 23: mod_base = gm
tcggatataaaggttgcgtccag

SEQ ID NO: 1730 - RNA, 21 nt, synthetic construct
  source 1..21: mol_type = other RNA
  modified_base 1: mod_base = OTHER; note = 2'-O-methylguanosine with a 3'-phosphorothioate linkage
  modified_base 2: mod_base = OTHER; note = 2'-O-methyladenosine with a 3'-phosphorothioate linkage
  modified_base 3: mod_base = cm
  modified_base 4: mod_base = gm
  modified_base 5: mod_base = cm
  modified_base 6: mod_base = OTHER; note = 2'-O-methyladenosine
  modified_base 7: mod_base = OTHER; note = 2'-O-methyladenosine
  modified_base 8: mod_base = cm
  modified_base 9: mod_base = OTHER; note = 2'-fluorocytidine
  modified_base 10: mod_base = OTHER; note = 2'-fluorouridine
  modified_base 11: mod_base = OTHER; note = 2'-fluorouridine
  modified_base 12: mod_base = um
  modified_base 13: mod_base = OTHER; note = 2'-O-methyladenosine
  modified_base 14: mod_base = um
  modified_base 15: mod_base = OTHER; note = 2'-O-methyladenosine
  modified_base 16: mod_base = um
  modified_base 17: mod_base = cm
  modified_base 18: mod_base = cm
  modified_base 19: mod_base = OTHER; note = 2'-O-methylguanosine with a 3'-phosphorothioate linkage
  modified_base 20: mod_base = OTHER; note = 2'-O-methyluridine with a 3'-phosphorothioate linkage
  modified_base 21: mod_base = OTHER; note = 2'-O-methyladenosine
gacgcaacctttatatccgta

SEQ ID NO: 1731 - RNA, 23 nt, synthetic construct
  source 1..23: mol_type = other RNA
  modified_base 1: mod_base = OTHER; note = 2'-O-methyluridine with a 3'-phosphorothioate linkage and a 5'-phosphate substitution
  modified_base 2: mod_base = OTHER; note = 2'-fluoroadenosine with a 3'-phosphorothioate linkage
  modified_base 3: mod_base = cm
  modified_base 4: mod_base = gm
  modified_base 5: mod_base = OTHER; note = 2'-fluoroguanosine
  modified_base 6: mod_base = OTHER; note = 2'-O-methyladenosine
  modified_base 7: mod_base = OTHER; note = 2'-fluorouridine
  modified_base 8: mod_base = OTHER; note = 2'-O-methyladenosine
  modified_base 9: mod_base = um
  modified_base 10: mod_base = OTHER; note = 2'-O-methyladenosine
  modified_base 11: mod_base = OTHER; note = 2'-O-methyladenosine
  modified_base 12: mod_base = OTHER; note = 2'-O-methyladenosine
  modified_base 13: mod_base = gm
  modified_base 14: mod_base = OTHER; note = 2'-fluoroguanosine
  modified_base 15: mod_base = um
  modified_base 16: mod_base = OTHER; note = 2'-fluorouridine
  modified_base 17: mod_base = gm
  modified_base 18: mod_base = cm
  modified_base 19: mod_base = gm
  modified_base 20: mod_base = um
  modified_base 21: mod_base = OTHER; note = 2'-O-methylcytidine with a 3'-phosphorothioate linkage
  modified_base 22: mod_base = OTHER; note = 2'-O-methylcytidine with a 3'-phosphorothioate linkage
  modified_base 23: mod_base = OTHER; note = 2'-O-methyladenosine
tacggatataaaggttgcgtcca

SEQ ID NO: 1732 - RNA, 21 nt, synthetic construct
  source 1..21: mol_type = other RNA
  modified_base 1: mod_base = OTHER; note = 2'-O-methylcytidine with a 3'-phosphorothioate linkage
  modified_base 2: mod_base = OTHER; note = 2'-O-methylguanosine with a 3'-phosphorothioate linkage
  modified_base 3: mod_base = cm
  modified_base 4: mod_base = OTHER; note = 2'-O-methyladenosine
  modified_base 5: mod_base = OTHER; note = 2'-O-methyladenosine
  modified_base 6: mod_base = cm
  modified_base 7: mod_base = cm
  modified_base 8: mod_base = um
  modified_base 9: mod_base = OTHER; note = 2'-fluorouridine
  modified_base 10: mod_base = OTHER; note = 2'-fluorouridine
  modified_base 11: mod_base = OTHER; note = 2'-fluoroadenosine
  modified_base 12: mod_base = um
  modified_base 13: mod_base = OTHER; note = 2'-O-methyladenosine
  modified_base 14: mod_base = um
  modified_base 15: mod_base = cm
  modified_base 16: mod_base = cm
  modified_base 17: mod_base = gm
  modified_base 18: mod_base = um
  modified_base 19: mod_base = OTHER; note = 2'-O-methyluridine with a 3'-phosphorothioate linkage
  modified_base 20: mod_base = OTHER; note = 2'-O-methyluridine with a 3'-phosphorothioate linkage
  modified_base 21: mod_base = OTHER; note = 2'-O-methyladenosine
cgcaacctttatatccgttta

SEQ ID NO: 1733 - RNA, 23 nt, synthetic construct
  source 1..23: mol_type = other RNA
  modified_base 1: mod_base = OTHER; note = 2'-O-methyluridine with a 3'-phosphorothioate linkage and a 5'-phosphate substitution
  modified_base 2: mod_base = OTHER; note = 2'-fluoroadenosine with a 3'-phosphorothioate linkage
  modified_base 3: mod_base = OTHER; note = 2'-O-methyladenosine
  modified_base 4: mod_base = OTHER; note = 2'-O-methyladenosine
  modified_base 5: mod_base = OTHER; note = 2'-fluorocytidine
  modified_base 6: mod_base = gm
  modified_base 7: mod_base = OTHER; note = 2'-fluoroguanosine
  modified_base 8: mod_base = OTHER; note = 2'-O-methyladenosine
  modified_base 9: mod_base = um
  modified_base 10: mod_base = OTHER; note = 2'-O-methyladenosine
  modified_base 11: mod_base = um
  modified_base 12: mod_base = OTHER; note = 2'-O-methyladenosine
  modified_base 13: mod_base = OTHER; note = 2'-O-methyladenosine
  modified_base 14: mod_base = OTHER; note = 2'-fluoroadenosine
  modified_base 15: mod_base = gm
  modified_base 16: mod_base = OTHER; note = 2'-fluoroguanosine
  modified_base 17: mod_base = um
  modified_base 18: mod_base = um
  modified_base 19: mod_base = gm
  modified_base 20: mod_base = cm
  modified_base 21: mod_base = OTHER; note = 2'-O-methylguanosine with a 3'-phosphorothioate linkage
  modified_base 22: mod_base = OTHER; note = 2'-O-methyluridine with a 3'-phosphorothioate linkage
  modified_base 23: mod_base = cm
taaacggatataaaggttgcgtc

SEQ ID NO: 1734 - RNA, 21 nt, synthetic construct
  source 1..21: mol_type = other RNA
  modified_base 1: mod_base = OTHER; note = 2'-O-methylguanosine with a 3'-phosphorothioate linkage
  modified_base 2: mod_base = OTHER; note = 2'-O-methylcytidine with a 3'-phosphorothioate linkage
  modified_base 3: mod_base = OTHER; note = 2'-O-methyladenosine
  modified_base 4: mod_base = OTHER; note = 2'-O-methyladenosine
  modified_base 5: mod_base = cm
  modified_base 6: mod_base = cm
  modified_base 7: mod_base = um
  modified_base 8: mod_base = um
  modified_base 9: mod_base = OTHER; note = 2'-fluorouridine
  modified_base 10: mod_base = OTHER; note = 2'-fluoroadenosine
  modified_base 11: mod_base = OTHER; note = 2'-fluorouridine
  modified_base 12: mod_base = OTHER; note = 2'-O-methyladenosine
  modified_base 13: mod_base = um
  modified_base 14: mod_base = cm
  modified_base 15: mod_base = cm
  modified_base 16: mod_base = gm
  modified_base 17: mod_base = um
  modified_base 18: mod_base = um
  modified_base 19: mod_base = OTHER; note = 2'-O-methyluridine with a 3'-phosphorothioate linkage
  modified_base 20: mod_base = OTHER; note = 2'-O-methylcytidine with a 3'-phosphorothioate linkage
  modified_base 21: mod_base = OTHER; note = 2'-O-methyladenosine
gcaacctttatatccgtttca

SEQ ID NO: 1735 - RNA, 23 nt, synthetic construct
  source 1..23: mol_type = other RNA
  modified_base 1: mod_base = OTHER; note = 2'-O-methyluridine with a 3'-phosphorothioate linkage and a 5'-phosphate substitution
  modified_base 2: mod_base = OTHER; note = 2'-fluoroguanosine with a 3'-phosphorothioate linkage
  modified_base 3: mod_base = OTHER; note = 2'-O-methyladenosine
  modified_base 4: mod_base = OTHER; note = 2'-O-methyladenosine
  modified_base 5: mod_base = OTHER; note = 2'-fluoroadenosine
  modified_base 6: mod_base = cm
  modified_base 7: mod_base = OTHER; note = 2'-fluoroguanosine
  modified_base 8: mod_base = gm
  modified_base 9: mod_base = OTHER; note = 2'-O-methyladenosine
  modified_base 10: mod_base = um
  modified_base 11: mod_base = OTHER; note = 2'-O-methyladenosine
  modified_base 12: mod_base = um
  modified_base 13: mod_base = OTHER; note = 2'-O-methyladenosine
  modified_base 14: mod_base = OTHER; note = 2'-fluoroadenosine
  modified_base 15: mod_base = OTHER; note = 2'-O-methyladenosine
  modified_base 16: mod_base = OTHER; note = 2'-fluoroguanosine
  modified_base 17: mod_base = gm
  modified_base 18: mod_base = um
  modified_base 19: mod_base = um
  modified_base 20: mod_base = gm
  modified_base 21: mod_base = OTHER; note = 2'-O-methylcytidine with a 3'-phosphorothioate linkage
  modified_base 22: mod_base = OTHER; note = 2'-O-methylguanosine with a 3'-phosphorothioate linkage
  modified_base 23: mod_base = um
tgaaacggatataaaggttgcgt

SEQ ID NO: 1736 - RNA, 21 nt, synthetic construct
  source 1..21: mol_type = other RNA
  modified_base 1: mod_base = OTHER; note = 2'-O-methylcytidine with a 3'-phosphorothioate linkage
  modified_base 2: mod_base = OTHER; note = 2'-O-methyladenosine with a 3'-phosphorothioate linkage
  modified_base 3: mod_base = OTHER; note = 2'-O-methyladenosine
  modified_base 4: mod_base = cm
  modified_base 5: mod_base = cm
  modified_base 6: mod_base = um
  modified_base 7: mod_base = um
  modified_base 8: mod_base = um
  modified_base 9: mod_base = OTHER; note = 2'-fluoroadenosine
  modified_base 10: mod_base = OTHER; note = 2'-fluorouridine
  modified_base 11: mod_base = OTHER; note = 2'-fluoroadenosine
  modified_base 12: mod_base = um
  modified_base 13: mod_base = cm
  modified_base 14: mod_base = cm
  modified_base 15: mod_base = gm
  modified_base 16: mod_base = um
  modified_base 17: mod_base = um
  modified_base 18: mod_base = um
  modified_base 19: mod_base = OTHER; note = 2'-O-methylcytidine with a 3'-phosphorothioate linkage
  modified_base 20: mod_base = OTHER; note = 2'-O-methylcytidine with a 3'-phosphorothioate linkage
  modified_base 21: mod_base = OTHER; note = 2'-O-methyladenosine
caacctttatatccgtttcca

SEQ ID NO: 1737 - RNA, 23 nt, synthetic construct
  source 1..23: mol_type = other RNA
  modified_base 1: mod_base = OTHER; note = 2'-O-methyluridine with a 3'-phosphorothioate linkage and a 5'-phosphate substitution
  modified_base 2: mod_base = OTHER; note = 2'-fluoroguanosine with a 3'-phosphorothioate linkage
  modified_base 3: mod_base = gm
  modified_base 4: mod_base = OTHER; note = 2'-O-methyladenosine
  modified_base 5: mod_base = OTHER; note = 2'-fluoroadenosine
  modified_base 6: mod_base = OTHER; note = 2'-O-methyladenosine
  modified_base 7: mod_base = OTHER; note = 2'-fluorocytidine
  modified_base 8: mod_base = gm
  modified_base 9: mod_base = gm
  modified_base 10: mod_base = OTHER; note = 2'-O-methyladenosine
  modified_base 11: mod_base = um
  modified_base 12: mod_base = OTHER; note = 2'-O-methyladenosine
  modified_base 13: mod_base = um
  modified_base 14: mod_base = OTHER; note = 2'-fluoroadenosine
  modified_base 15: mod_base = OTHER; note = 2'-O-methyladenosine
  modified_base 16: mod_base = OTHER; note = 2'-fluoroadenosine
  modified_base 17: mod_base = gm
  modified_base 18: mod_base = gm
  modified_base 19: mod_base = um
  modified_base 20: mod_base = um
  modified_base 21: mod_base = OTHER; note = 2'-O-methylguanosine with a 3'-phosphorothioate linkage
  modified_base 22: mod_base = OTHER; note = 2'-O-methylcytidine with a 3'-phosphorothioate linkage
  modified_base 23: mod_base = gm
tggaaacggatataaaggttgcg

SEQ ID NO: 1738 - RNA, 21 nt, synthetic construct
  source 1..21: mol_type = other RNA
  modified_base 1: mod_base = OTHER; note = 2'-O-methylcytidine with a 3'-phosphorothioate linkage
  modified_base 2: mod_base = OTHER; note = 2'-O-methylcytidine with a 3'-phosphorothioate linkage
  modified_base 3: mod_base = um
  modified_base 4: mod_base = um
  modified_base 5: mod_base = um
  modified_base 6: mod_base = OTHER; note = 2'-O-methyladenosine
  modified_base 7: mod_base = um
  modified_base 8: mod_base = OTHER; note = 2'-O-methyladenosine
  modified_base 9: mod_base = OTHER; note = 2'-fluorouridine
  modified_base 10: mod_base = OTHER; note = 2'-fluorocytidine
  modified_base 11: mod_base = OTHER; note = 2'-fluorocytidine
  modified_base 12: mod_base = gm
  modified_base 13: mod_base = um
  modified_base 14: mod_base = um
  modified_base 15: mod_base = um
  modified_base 16: mod_base = cm
  modified_base 17: mod_base = cm
  modified_base 18: mod_base = OTHER; note = 2'-O-methyladenosine
  modified_base 19: mod_base = OTHER; note = 2'-O-methylguanosine with a 3'-phosphorothioate linkage
  modified_base 20: mod_base = OTHER; note = 2'-O-methyluridine with a 3'-phosphorothioate linkage
  modified_base 21: mod_base = OTHER; note = 2'-O-methyladenosine
cctttatatccgtttccagta

SEQ ID NO: 1739 - RNA, 23 nt, synthetic construct
  source 1..23: mol_type = other RNA
  modified_base 1: mod_base = OTHER; note = 2'-O-methyluridine with a 3'-phosphorothioate linkage and a 5'-phosphate substitution
  modified_base 2: mod_base = OTHER; note = 2'-fluoroadenosine with a 3'-phosphorothioate linkage
  modified_base 3: mod_base = cm
  modified_base 4: mod_base = um
  modified_base 5: mod_base = OTHER; note = 2'-fluoroguanosine
  modified_base 6: mod_base = gm
  modified_base 7: mod_base = OTHER; note = 2'-fluoroadenosine
  modified_base 8: mod_base = OTHER; note = 2'-O-methyladenosine
  modified_base 9: mod_base = OTHER; note = 2'-O-methyladenosine
  modified_base 10: mod_base = cm
  modified_base 11: mod_base = gm
  modified_base 12: mod_base = gm
  modified_base 13: mod_base = OTHER; note = 2'-O-methyladenosine
  modified_base 14: mod_base = OTHER; note = 2'-fluorouridine
  modified_base 15: mod_base = OTHER; note = 2'-O-methyladenosine
  modified_base 16: mod_base = OTHER; note = 2'-fluorouridine
  modified_base 17: mod_base = OTHER; note = 2'-O-methyladenosine
  modified_base 18: mod_base = OTHER; note = 2'-O-methyladenosine
  modified_base 19: mod_base = OTHER; note = 2'-O-methyladenosine
  modified_base 20: mod_base = gm
  modified_base 21: mod_base = OTHER; note = 2'-O-methylguanosine with a 3'-phosphorothioate linkage
  modified_base 22: mod_base = OTHER; note = 2'-O-methyluridine with a 3'-phosphorothioate linkage
  modified_base 23: mod_base = um
tactggaaacggatataaaggtt

SEQ ID NO: 1740 - RNA, 21 nt, synthetic construct
  source 1..21: mol_type = other RNA
  modified_base 1: mod_base = OTHER; note = 2'-O-methylcytidine with a 3'-phosphorothioate linkage
  modified_base 2: mod_base = OTHER; note = 2'-O-methyluridine with a 3'-phosphorothioate linkage
  modified_base 3: mod_base = um
  modified_base 4: mod_base = um
  modified_base 5: mod_base = OTHER; note = 2'-O-methyladenosine
  modified_base 6: mod_base = um
  modified_base 7: mod_base = OTHER; note = 2'-O-methyladenosine
  modified_base 8: mod_base = um
  modified_base 9: mod_base = OTHER; note = 2'-fluorocytidine
  modified_base 10: mod_base = OTHER; note = 2'-fluorocytidine
  modified_base 11: mod_base = OTHER; note = 2'-fluoroguanosine
  modified_base 12: mod_base = um
  modified_base 13: mod_base = um
  modified_base 14: mod_base = um
  modified_base 15: mod_base = cm
  modified_base 16: mod_base = cm
  modified_base 17: mod_base = OTHER; note = 2'-O-methyladenosine
  modified_base 18: mod_base = gm
  modified_base 19: mod_base = OTHER; note = 2'-O-methyluridine with a 3'-phosphorothioate linkage
  modified_base 20: mod_base = OTHER; note = 2'-O-methylcytidine with a 3'-phosphorothioate linkage
  modified_base 21: mod_base = OTHER; note = 2'-O-methyladenosine
ctttatatccgtttccagtca

SEQ ID NO: 1741 - RNA, 23 nt, synthetic construct
  source 1..23: mol_type = other RNA
  modified_base 1: mod_base = OTHER; note = 2'-O-methyluridine with a 3'-phosphorothioate linkage and a 5'-phosphate substitution
  modified_base 2: mod_base = OTHER; note = 2'-fluoroguanosine with a 3'-phosphorothioate linkage
  modified_base 3: mod_base = OTHER; note = 2'-O-methyladenosine
  modified_base 4: mod_base = cm
  modified_base 5: mod_base = OTHER; note = 2'-fluorouridine
  modified_base 6: mod_base = gm
  modified_base 7: mod_base = OTHER; note = 2'-fluoroguanosine
  modified_base 8: mod_base = OTHER; note = 2'-O-methyladenosine
  modified_base 9: mod_base = OTHER; note = 2'-O-methyladenosine
  modified_base 10: mod_base = OTHER; note = 2'-O-methyladenosine
  modified_base 11: mod_base = cm
  modified_base 12: mod_base = gm
  modified_base 13: mod_base = gm
  modified_base 14: mod_base = OTHER; note = 2'-fluoroadenosine
  modified_base 15: mod_base = um
  modified_base 16: mod_base = OTHER; note = 2'-fluoroadenosine
  modified_base 17: mod_base = um
  modified_base 18: mod_base = OTHER; note = 2'-O-methyladenosine
  modified_base 19: mod_base = OTHER; note = 2'-O-methyladenosine
  modified_base 20: mod_base = OTHER; note = 2'-O-methyladenosine
  modified_base 21: mod_base = OTHER; note = 2'-O-methylguanosine with a 3'-phosphorothioate linkage
  modified_base 22: mod_base = OTHER; note = 2'-O-methylguanosine with a 3'-phosphorothioate linkage
  modified_base 23: mod_base = um
tgactggaaacggatataaaggt

SEQ ID NO: 1742 - RNA, 21 nt, synthetic construct
  source 1..21: mol_type = other RNA
  modified_base 1: mod_base = OTHER; note = 2'-O-methyluridine with a 3'-phosphorothioate linkage
  modified_base 2: mod_base = OTHER; note = 2'-O-methyladenosine with a 3'-phosphorothioate linkage
  modified_base 3: mod_base = um
  modified_base 4: mod_base = cm
  modified_base 5: mod_base = cm
  modified_base 6: mod_base = gm
  modified_base 7: mod_base = um
  modified_base 8: mod_base = um
  modified_base 9: mod_base = OTHER; note = 2'-fluorouridine
  modified_base 10: mod_base = OTHER; note = 2'-fluorocytidine
  modified_base 11: mod_base = OTHER; note = 2'-fluorocytidine
  modified_base 12: mod_base = OTHER; note = 2'-O-methyladenosine
  modified_base 13: mod_base = gm
  modified_base 14: mod_base = um
  modified_base 15: mod_base = cm
  modified_base 16: mod_base = cm
  modified_base 17: mod_base = OTHER; note = 2'-O-methyladenosine
  modified_base 18: mod_base = gm
  modified_base 19: mod_base = OTHER; note = 2'-O-methylguanosine with a 3'-phosphorothioate linkage
  modified_base 20: mod_base = OTHER; note = 2'-O-methyluridine with a 3'-phosphorothioate linkage
  modified_base 21: mod_base = OTHER; note = 2'-O-methyladenosine
tatccgtttccagtccaggta

SEQ ID NO: 1743 - RNA, 23 nt, synthetic construct
  source 1..23: mol_type = other RNA
  modified_base 1: mod_base = OTHER; note = 2'-O-methyluridine with a 3'-phosphorothioate linkage and a 5'-phosphate substitution
  modified_base 2: mod_base = OTHER; note = 2'-fluoroadenosine with a 3'-phosphorothioate linkage
  modified_base 3: mod_base = cm
  modified_base 4: mod_base = cm
  modified_base 5: mod_base = OTHER; note = 2'-fluorouridine
  modified_base 6: mod_base = gm
  modified_base 7: mod_base = OTHER; note = 2'-fluoroguanosine
  modified_base 8: mod_base = OTHER; note = 2'-O-methyladenosine
  modified_base 9: mod_base = cm
  modified_base 10: mod_base = um
  modified_base 11: mod_base = gm
  modified_base 12: mod_base = gm
  modified_base 13: mod_base = OTHER; note = 2'-O-methyladenosine
  modified_base 14: mod_base = OTHER; note = 2'-fluoroadenosine
  modified_base 15: mod_base = OTHER; note = 2'-O-methyladenosine
  modified_base 16: mod_base = OTHER; note = 2'-fluorocytidine
  modified_base 17: mod_base = gm
  modified_base 18: mod_base = gm
  modified_base 19: mod_base = OTHER; note = 2'-O-methyladenosine
  modified_base 20: mod_base = um
  modified_base 21: mod_base = OTHER; note = 2'-O-methyladenosine with a 3'-phosphorothioate linkage
  modified_base 22: mod_base = OTHER; note = 2'-O-methyluridine with a 3'-phosphorothioate linkage
  modified_base 23: mod_base = OTHER; note = 2'-O-methyladenosine
tacctggactggaaacggatata

SEQ ID NO: 1744 - RNA, 21 nt, synthetic construct
  source 1..21: mol_type = other RNA
  modified_base 1: mod_base = OTHER; note = 2'-O-methyluridine with a 3'-phosphorothioate linkage
  modified_base 2: mod_base = OTHER; note = 2'-O-methyluridine with a 3'-phosphorothioate linkage
  modified_base 3: mod_base = gm
  modified_base 4: mod_base = um
  modified_base 5: mod_base = um
  modified_base 6: mod_base = um
  modified_base 7: mod_base = gm
  modified_base 8: mod_base = um
  modified_base 9: mod_base = OTHER; note = 2'-fluoroguanosine
  modified_base 10: mod_base = OTHER; note = 2'-fluoroadenosine
  modified_base 11: mod_base = OTHER; note = 2'-fluoroadenosine
  modified_base 12: mod_base = gm
  modified_base 13: mod_base = cm
  modified_base 14: mod_base = um
  modified_base 15: mod_base = gm
  modified_base 16: mod_base = um
  modified_base 17: mod_base = cm
  modified_base 18: mod_base = OTHER; note = 2'-O-methyladenosine
  modified_base 19: mod_base = OTHER; note = 2'-O-methyluridine with a 3'-phosphorothioate linkage
  modified_base 20: mod_base = OTHER; note = 2'-O-methyluridine with a 3'-phosphorothioate linkage
  modified_base 21: mod_base = OTHER; note = 2'-O-methyladenosine
ttgtttgtgaagctgtcatta

SEQ ID NO: 1745 - RNA, 23 nt, synthetic construct
  source 1..23: mol_type = other RNA
  modified_base 1: mod_base = OTHER; note = 2'-O-methyluridine with a 3'-phosphorothioate linkage and a 5'-phosphate substitution
  modified_base 2: mod_base = OTHER; note = 2'-fluoroadenosine with a 3'-phosphorothioate linkage
  modified_base 3: mod_base = OTHER; note = 2'-O-methyladenosine
  modified_base 4: mod_base = um
  modified_base 5: mod_base = OTHER; note = 2'-fluoroguanosine
  modified_base 6: mod_base = OTHER; note = 2'-O-methyladenosine
  modified_base 7: mod_base = OTHER; note = 2'-fluorocytidine
  modified_base 8: mod_base = OTHER; note = 2'-O-methyladenosine
  modified_base 9: mod_base = gm
  modified_base 10: mod_base = cm
  modified_base 11: mod_base = um
  modified_base 12: mod_base = um
  modified_base 13: mod_base = cm
  modified_base 14: mod_base = OTHER; note = 2'-fluoroadenosine
  modified_base 15: mod_base = cm
  modified_base 16: mod_base = OTHER; note = 2'-fluoroadenosine
  modified_base 17: mod_base = OTHER; note = 2'-O-methyladenosine
  modified_base 18: mod_base = OTHER; note = 2'-O-methyladenosine
  modified_base 19: mod_base = cm
  modified_base 20: mod_base = OTHER; note = 2'-O-methyladenosine
  modified_base 21: mod_base = OTHER; note = 2'-O-methyladenosine with a 3'-phosphorothioate linkage
  modified_base 22: mod_base = OTHER; note = 2'-O-methylcytidine with a 3'-phosphorothioate linkage
  modified_base 23: mod_base = OTHER; note = 2'-O-methyladenosine
taatgacagcttcacaaacaaca

SEQ ID NO: 1746 - RNA, 21 nt, synthetic construct
  source 1..21: mol_type = other RNA
  modified_base 1: mod_base = OTHER; note = 2'-O-methyluridine with a 3'-phosphorothioate linkage
  modified_base 2: mod_base = OTHER; note = 2'-O-methyluridine with a 3'-phosphorothioate linkage
  modified_base 3: mod_base = um
  modified_base 4: mod_base = gm
  modified_base 5: mod_base = um
  modified_base 6: mod_base = gm
  modified_base 7: mod_base = OTHER; note = 2'-O-methyladenosine
  modified_base 8: mod_base = OTHER; note = 2'-O-methyladenosine
  modified_base 9: mod_base = OTHER; note = 2'-fluoroguanosine
  modified_base 10: mod_base = OTHER; note = 2'-fluorocytidine
  modified_base 11: mod_base = OTHER; note = 2'-fluorouridine
  modified_base 12: mod_base = gm
  modified_base 13: mod_base = um
  modified_base 14: mod_base = cm
  modified_base 15: mod_base = OTHER; note = 2'-O-methyladenosine
  modified_base 16: mod_base = um
  modified_base 17: mod_base = um
  modified_base 18: mod_base = cm
  modified_base 19: mod_base = OTHER; note = 2'-O-methylcytidine with a 3'-phosphorothioate linkage
  modified_base 20: mod_base = OTHER; note = 2'-O-methyladenosine with a 3'-phosphorothioate linkage
  modified_base 21: mod_base = OTHER; note = 2'-O-methyladenosine
tttgtgaagctgtcattccaa

SEQ ID NO: 1747 - RNA, 23 nt, synthetic construct
  source 1..23: mol_type = other RNA
  modified_base 1: mod_base = OTHER; note = 2'-O-methyluridine with a 3'-phosphorothioate linkage and a 5'-phosphate substitution
  modified_base 2: mod_base = OTHER; note = 2'-fluorouridine with a 3'-phosphorothioate linkage
  modified_base 3: mod_base = gm
  modified_base 4: mod_base = gm
  modified_base 5: mod_base = OTHER; note = 2'-fluoroadenosine
  modified_base 6: mod_base = OTHER; note = 2'-O-methyladenosine
  modified_base 7: mod_base = OTHER; note = 2'-fluorouridine
  modified_base 8: mod_base = gm
  modified_base 9: mod_base = OTHER; note = 2'-O-methyladenosine
  modified_base 10: mod_base = cm
  modified_base 11: mod_base = OTHER; note = 2'-O-methyladenosine
  modified_base 12: mod_base = gm
  modified_base 13: mod_base = cm
  modified_base 14: mod_base = OTHER; note = 2'-fluorouridine
  modified_base 15: mod_base = um
  modified_base 16: mod_base = OTHER; note = 2'-fluorocytidine
  modified_base 17: mod_base = OTHER; note = 2'-O-methyladenosine
  modified_base 18: mod_base = cm
  modified_base 19: mod_base = OTHER; note = 2'-O-methyladenosine
  modified_base 20: mod_base = OTHER; note = 2'-O-methyladenosine
  modified_base 21: mod_base = OTHER; note = 2'-O-methyladenosine with a 3'-phosphorothioate linkage
  modified_base 22: mod_base = OTHER; note = 2'-O-methylcytidine with a 3'-phosphorothioate linkage
  modified_base 23: mod_base = OTHER; note = 2'-O-methyladenosine
ttggaatgacagcttcacaaaca

SEQ ID NO: 1748 - RNA, 21 nt, synthetic construct
  source 1..21: mol_type = other RNA
  modified_base 1: mod_base = OTHER; note = 2'-O-methyluridine with a 3'-phosphorothioate linkage
  modified_base 2: mod_base = OTHER; note = 2'-O-methyluridine with a 3'-phosphorothioate linkage
  modified_base 3: mod_base = gm
  modified_base 4: mod_base = um
  modified_base 5: mod_base = gm
  modified_base 6: mod_base = OTHER; note = 2'-O-methyladenosine
  modified_base 7: mod_base = OTHER; note = 2'-O-methyladenosine
  modified_base 8: mod_base = gm
  modified_base 9: mod_base = OTHER; note = 2'-fluorocytidine
  modified_base 10: mod_base = OTHER; note = 2'-fluorouridine
  modified_base 11: mod_base = OTHER; note = 2'-fluoroguanosine
  modified_base 12: mod_base = um
  modified_base 13: mod_base = cm
  modified_base 14: mod_base = OTHER; note = 2'-O-methyladenosine
  modified_base 15: mod_base = um
  modified_base 16: mod_base = um
  modified_base 17: mod_base = cm
  modified_base 18: mod_base = cm
  modified_base 19: mod_base = OTHER; note = 2'-O-methyladenosine with a 3'-phosphorothioate linkage
  modified_base 20: mod_base = OTHER; note = 2'-O-methylguanosine with a 3'-phosphorothioate linkage
  modified_base 21: mod_base = OTHER; note = 2'-O-methyladenosine
ttgtgaagctgtcattccaga

SEQ ID NO: 1749 - RNA, 23 nt, synthetic construct
  source 1..23: mol_type = other RNA
  modified_base 1: mod_base = OTHER; note = 2'-O-methyluridine with a 3'-phosphorothioate linkage and a 5'-phosphate substitution
  modified_base 2: mod_base = OTHER; note = 2'-fluorocytidine with a 3'-phosphorothioate linkage
  modified_base 3: mod_base = um
  modified_base 4: mod_base = gm
  modified_base 5: mod_base = OTHER; note = 2'-fluoroguanosine
  modified_base 6: mod_base = OTHER; note = 2'-O-methyladenosine
  modified_base 7: mod_base = OTHER; note = 2'-fluoroadenosine
  modified_base 8: mod_base = um
  modified_base 9: mod_base = gm
  modified_base 10: mod_base = OTHER; note = 2'-O-methyladenosine
  modified_base 11: mod_base = cm
  modified_base 12: mod_base = OTHER; note = 2'-O-methyladenosine
  modified_base 13: mod_base = gm
  modified_base 14: mod_base = OTHER; note = 2'-fluorocytidine
  modified_base 15: mod_base = um
  modified_base 16: mod_base = OTHER; note = 2'-fluorouridine
  modified_base 17: mod_base = cm
  modified_base 18: mod_base = OTHER; note = 2'-O-methyladenosine
  modified_base 19: mod_base = cm
  modified_base 20: mod_base = OTHER; note = 2'-O-methyladenosine
  modified_base 21: mod_base = OTHER; note = 2'-O-methyladenosine with a 3'-phosphorothioate linkage
  modified_base 22: mod_base = OTHER; note = 2'-O-methyladenosine with a 3'-phosphorothioate linkage
  modified_base 23: mod_base = cm
tctggaatgacagcttcacaaac

SEQ ID NO: 1750 - RNA, 21 nt, synthetic construct
  source 1..21: mol_type = other RNA
  modified_base 1: mod_base = OTHER; note = 2'-O-methylguanosine with a 3'-phosphorothioate linkage
  modified_base 2: mod_base = OTHER; note = 2'-O-methyladenosine with a 3'-phosphorothioate linkage
  modified_base 3: mod_base = OTHER; note = 2'-O-methyladenosine
  modified_base 4: mod_base = gm
  modified_base 5: mod_base = cm
  modified_base 6: mod_base = um
  modified_base 7: mod_base = gm
  modified_base 8: mod_base = um
  modified_base 9: mod_base = OTHER; note = 2'-fluorocytidine
  modified_base 10: mod_base = OTHER; note = 2'-fluoroadenosine
  modified_base 11: mod_base = OTHER; note = 2'-fluorouridine
  modified_base 12: mod_base = um
  modified_base 13: mod_base = cm
  modified_base 14: mod_base = cm
  modified_base 15: mod_base = OTHER; note = 2'-O-methyladenosine
  modified_base 16: mod_base = gm
  modified_base 17: mod_base = cm
  modified_base 18: mod_base = cm
  modified_base 19: mod_base = OTHER; note = 2'-O-methyladenosine with a 3'-phosphorothioate linkage
  modified_base 20: mod_base = OTHER; note = 2'-O-methyladenosine with a 3'-phosphorothioate linkage
  modified_base 21: mod_base = OTHER; note = 2'-O-methyladenosine
gaagctgtcattccagccaaa

SEQ ID NO: 1751 - RNA, 23 nt, synthetic construct
  source 1..23: mol_type = other RNA
  modified_base 1: mod_base = OTHER; note = 2'-O-methyluridine with a 3'-phosphorothioate linkage and a 5'-phosphate substitution
  modified_base 2: mod_base = OTHER; note = 2'-fluorouridine with a 3'-phosphorothioate linkage
  modified_base 3: mod_base = um
  modified_base 4: mod_base = gm
  modified_base 5: mod_base = OTHER; note = 2'-fluoroguanosine
  modified_base 6: mod_base = cm
  modified_base 7: mod_base = OTHER; note = 2'-fluorouridine
  modified_base 8: mod_base = gm
  modified_base 9: mod_base = gm
  modified_base 10: mod_base = OTHER; note = 2'-O-methyladenosine
  modified_base 11: mod_base = OTHER; note = 2'-O-methyladenosine
  modified_base 12: mod_base = um
  modified_base 13: mod_base = gm
  modified_base 14: mod_base = OTHER; note = 2'-fluoroadenosine
  modified_base 15: mod_base = cm
  modified_base 16: mod_base = OTHER; note = 2'-fluoroadenosine
  modified_base 17: mod_base = gm
  modified_base 18: mod_base = cm
  modified_base 19: mod_base = um
  modified_base 20: mod_base = um
  modified_base 21: mod_base = OTHER; note = 2'-O-methylcytidine with a 3'-phosphorothioate linkage
  modified_base 22: mod_base = OTHER; note = 2'-O-methyladenosine with a 3'-phosphorothioate linkage
  modified_base 23: mod_base = cm
tttggctggaatgacagcttcac

SEQ ID NO: 1752 - RNA, 21 nt, synthetic construct
  source 1..21: mol_type = other RNA
  modified_base 1: mod_base = OTHER; note = 2'-O-methylguanosine with a 3'-phosphorothioate linkage
  modified_base 2: mod_base = OTHER; note = 2'-O-methylcytidine with a 3'-phosphorothioate linkage
  modified_base 3: mod_base = um
  modified_base 4: mod_base = gm
  modified_base 5: mod_base = um
  modified_base 6: mod_base = cm
  modified_base 7: mod_base = OTHER; note = 2'-O-methyladenosine
  modified_base 8: mod_base = um
  modified_base 9: mod_base = OTHER; note = 2'-fluorouridine
  modified_base 10: mod_base = OTHER; note = 2'-fluorocytidine
  modified_base 11: mod_base = OTHER; note = 2'-fluorocytidine
  modified_base 12: mod_base = OTHER; note = 2'-O-methyladenosine
  modified_base 13: mod_base = gm
  modified_base 14: mod_base = cm
  modified_base 15: mod_base = cm
  modified_base 16: mod_base = OTHER; note = 2'-O-methyladenosine
  modified_base 17: mod_base = OTHER; note = 2'-O-methyladenosine
  modified_base 18: mod_base = gm
  modified_base 19: mod_base = OTHER; note = 2'-O-methylguanosine with a 3'-phosphorothioate linkage
  modified_base 20: mod_base = OTHER; note = 2'-O-methyluridine with a 3'-phosphorothioate linkage
  modified_base 21: mod_base = OTHER; note = 2'-O-methyladenosine
gctgtcattccagccaaggta

SEQ ID NO: 1753 - RNA, 23 nt, synthetic construct
  source 1..23: mol_type = other RNA
  modified_base 1: mod_base = OTHER; note = 2'-O-methyluridine with a 3'-phosphorothioate linkage and a 5'-phosphate substitution
  modified_base 2: mod_base = OTHER; note = 2'-fluoroadenosine with a 3'-phosphorothioate linkage
  modified_base 3: mod_base = cm
  modified_base 4: mod_base = cm
  modified_base 5: mod_base = OTHER; note = 2'-fluorouridine
  modified_base 6: mod_base = um
  modified_base 7: mod_base = OTHER; note = 2'-fluoroguanosine
  modified_base 8: mod_base = gm
  modified_base 9: mod_base = cm
  modified_base 10: mod_base = um
  modified_base 11: mod_base = gm
  modified_base 12: mod_base = gm
  modified_base 13: mod_base = OTHER; note = 2'-O-methyladenosine
  modified_base 14: mod_base = OTHER; note = 2'-fluoroadenosine
  modified_base 15: mod_base = um
  modified_base 16: mod_base = OTHER; note = 2'-fluoroguanosine
  modified_base 17: mod_base = OTHER; note = 2'-O-methyladenosine
  modified_base 18: mod_base = cm
  modified_base 19: mod_base = OTHER; note = 2'-O-methyladenosine
  modified_base 20: mod_base = gm
  modified_base 21: mod_base = OTHER; note = 2'-O-methylcytidine with a 3'-phosphorothioate linkage
  modified_base 22: mod_base = OTHER; note = 2'-O-methyluridine with a 3'-phosphorothioate linkage
  modified_base 23: mod_base = um
taccttggctggaatgacagctt

SEQ ID NO: 1754 - RNA, 21 nt, synthetic construct
  source 1..21: mol_type = other RNA
  modified_base 1: mod_base = OTHER; note = 2'-O-methylcytidine with a 3'-phosphorothioate linkage
  modified_base 2: mod_base = OTHER; note = 2'-O-methyluridine with a 3'-phosphorothioate linkage
  modified_base 3: mod_base = gm
  modified_base 4: mod_base = um
  modified_base 5: mod_base = cm
  modified_base 6: mod_base = OTHER; note = 2'-O-methyladenosine
  modified_base 7: mod_base = um
  modified_base 8: mod_base = um
  modified_base 9: mod_base = OTHER; note = 2'-fluorocytidine
  modified_base 10: mod_base = OTHER; note = 2'-fluorocytidine
  modified_base 11: mod_base = OTHER; note = 2'-fluoroadenosine
  modified_base 12: mod_base = gm
  modified_base 13: mod_base = cm
  modified_base 14: mod_base = cm
  modified_base 15: mod_base = OTHER; note = 2'-O-methyladenosine
  modified_base 16: mod_base = OTHER; note = 2'-O-methyladenosine
  modified_base 17: mod_base = gm
  modified_base 18: mod_base = gm
  modified_base 19: mod_base = OTHER; note = 2'-O-methyluridine with a 3'-phosphorothioate linkage
  modified_base 20: mod_base = OTHER; note = 2'-O-methyluridine with a 3'-phosphorothioate linkage
  modified_base 21: mod_base = OTHER; note = 2'-O-methyladenosine
ctgtcattccagccaaggtta

SEQ ID NO: 1755 - RNA, 23 nt, synthetic construct
  source 1..23: mol_type = other RNA
  modified_base 1: mod_base = OTHER; note = 2'-O-methyluridine with a 3'-phosphorothioate linkage and a 5'-phosphate substitution
  modified_base 2: mod_base = OTHER; note = 2'-fluoroadenosine with a 3'-phosphorothioate linkage
  modified_base 3: mod_base = OTHER; note = 2'-O-methyladenosine
  modified_base 4: mod_base = cm
  modified_base 5: mod_base = OTHER; note = 2'-fluorocytidine
  modified_base 6: mod_base = um
  modified_base 7: mod_base = OTHER; note = 2'-fluorouridine
  modified_base 8: mod_base = gm
  modified_base 9: mod_base = gm
  modified_base 10: mod_base = cm
  modified_base 11: mod_base = um
  modified_base 12: mod_base = gm
  modified_base 13: mod_base = gm
  modified_base 14: mod_base = OTHER; note = 2'-fluoroadenosine
  modified_base 15: mod_base = OTHER; note = 2'-O-methyladenosine
  modified_base 16: mod_base = OTHER; note = 2'-fluorouridine
  modified_base 17: mod_base = gm
  modified_base 18: mod_base = OTHER; note = 2'-O-methyladenosine
  modified_base 19: mod_base = cm
  modified_base 20: mod_base = OTHER; note = 2'-O-methyladenosine
  modified_base 21: mod_base = OTHER; note = 2'-O-methylguanosine with a 3'-phosphorothioate linkage
  modified_base 22: mod_base = OTHER; note = 2'-O-methylcytidine with a 3'-phosphorothioate linkage
  modified_base 23: mod_base = um
taaccttggctggaatgacagct

SEQ ID NO: 1756 - RNA, 21 nt, synthetic construct
  source 1..21: mol_type = other RNA
  modified_base 1: mod_base = OTHER; note = 2'-O-methyluridine with a 3'-phosphorothioate linkage
  modified_base 2: mod_base = OTHER; note = 2'-O-methylguanosine with a 3'-phosphorothioate linkage
  modified_base 3: mod_base = um
  modified_base 4: mod_base = cm
  modified_base 5: mod_base = OTHER; note = 2'-O-methyladenosine
  modified_base 6: mod_base = um
  modified_base 7: mod_base = um
  modified_base 8: mod_base = cm
  modified_base 9: mod_base = OTHER; note = 2'-fluorocytidine
  modified_base 10: mod_base = OTHER; note = 2'-fluoroadenosine
  modified_base 11: mod_base = OTHER; note = 2'-fluoroguanosine
  modified_base 12: mod_base = cm
  modified_base 13: mod_base = cm
  modified_base 14: mod_base = OTHER; note = 2'-O-methyladenosine
  modified_base 15: mod_base = OTHER; note = 2'-O-methyladenosine
  modified_base 16: mod_base = gm
  modified_base 17: mod_base = gm
  modified_base 18: mod_base = um
  modified_base 19: mod_base = OTHER; note = 2'-O-methyluridine with a 3'-phosphorothioate linkage
  modified_base 20: mod_base = OTHER; note = 2'-O-methylguanosine with a 3'-phosphorothioate linkage
  modified_base 21: mod_base = OTHER; note = 2'-O-methyladenosine
tgtcattccagccaaggttga

SEQ ID NO: 1757 - RNA, 23 nt, synthetic construct
  source 1..23: mol_type = other RNA
  modified_base 1: mod_base = OTHER; note = 2'-O-methyluridine with a 3'-phosphorothioate linkage and a 5'-phosphate substitution
  modified_base 2: mod_base = OTHER; note = 2'-fluorocytidine with a 3'-phosphorothioate linkage
  modified_base 3: mod_base = OTHER; note = 2'-O-methyladenosine
  modified_base 4: mod_base = OTHER; note = 2'-O-methyladenosine
  modified_base 5: mod_base = OTHER; note = 2'-fluorocytidine
  modified_base 6: mod_base = cm
  modified_base 7: mod_base = OTHER; note = 2'-fluorouridine
  modified_base 8: mod_base = um
  modified_base 9: mod_base = gm
  modified_base 10: mod_base = gm
  modified_base 11: mod_base = cm
  modified_base 12: mod_base = um
  modified_base 13: mod_base = gm
  modified_base 14: mod_base = OTHER; note = 2'-fluoroguanosine
  modified_base 15: mod_base = OTHER; note = 2'-O-methyladenosine
  modified_base 16: mod_base = OTHER; note = 2'-fluoroadenosine
  modified_base 17: mod_base = um
  modified_base 18: mod_base = gm
  modified_base 19: mod_base = OTHER; note = 2'-O-methyladenosine
  modified_base 20: mod_base = cm
  modified_base 21: mod_base = OTHER; note = 2'-O-methyladenosine with a 3'-phosphorothioate linkage
  modified_base 22: mod_base = OTHER; note = 2'-O-methylguanosine with a 3'-phosphorothioate linkage
  modified_base 23: mod_base = cm
tcaaccttggctggaatgacagc

SEQ ID NO: 1758 - RNA, 21 nt, synthetic construct
  source 1..21: mol_type = other RNA
  modified_base 1: mod_base = OTHER; note = 2'-O-methylguanosine with a 3'-phosphorothioate linkage
  modified_base 2: mod_base = OTHER; note = 2'-O-methyluridine with a 3'-phosphorothioate linkage
  modified_base 3: mod_base = cm
  modified_base 4: mod_base = OTHER; note = 2'-O-methyladenosine
  modified_base 5: mod_base = um
  modified_base 6: mod_base = um
  modified_base 7: mod_base = cm
  modified_base 8: mod_base = cm
  modified_base 9: mod_base = OTHER; note = 2'-fluoroadenosine
  modified_base 10: mod_base = OTHER; note = 2'-fluoroguanosine
  modified_base 11: mod_base = OTHER; note = 2'-fluorocytidine
  modified_base 12: mod_base = cm
  modified_base 13: mod_base = OTHER; note = 2'-O-methyladenosine
  modified_base 14: mod_base = OTHER; note = 2'-O-methyladenosine
  modified_base 15: mod_base = gm
  modified_base 16: mod_base = gm
  modified_base 17: mod_base = um
  modified_base 18: mod_base = um
  modified_base 19: mod_base = OTHER; note = 2'-O-methylguanosine with a 3'-phosphorothioate linkage
  modified_base 20: mod_base = OTHER; note = 2'-O-methyluridine with a 3'-phosphorothioate linkage
  modified_base 21: mod_base = OTHER; note = 2'-O-methyladenosine
gtcattccagccaaggttgta

SEQ ID NO: 1759 - RNA, 23 nt, synthetic construct
  source 1..23: mol_type = other RNA
  modified_base 1: mod_base = OTHER; note = 2'-O-methyluridine with a 3'-phosphorothioate linkage and a 5'-phosphate substitution
  modified_base 2: mod_base = OTHER; note = 2'-fluoroadenosine with a 3'-phosphorothioate linkage
  modified_base 3: mod_base = cm
  modified_base 4: mod_base = OTHER; note = 2'-O-methyladenosine
  modified_base 5: mod_base = OTHER; note = 2'-fluoroadenosine
  modified_base 6: mod_base = cm
  modified_base 7: mod_base = OTHER; note = 2'-fluorocytidine
  modified_base 8: mod_base = um
  modified_base 9: mod_base = um
  modified_base 10: mod_base = gm
  modified_base 11: mod_base = gm
  modified_base 12: mod_base = cm
  modified_base 13: mod_base = um
  modified_base 14: mod_base = OTHER; note = 2'-fluoroguanosine
  modified_base 15: mod_base = gm
  modified_base 16: mod_base = OTHER; note = 2'-fluoroadenosine
  modified_base 17: mod_base = OTHER; note = 2'-O-methyladenosine
  modified_base 18: mod_base = um
  modified_base 19: mod_base = gm
  modified_base 20: mod_base = OTHER; note = 2'-O-methyladenosine
  modified_base 21: mod_base = OTHER; note = 2'-O-methylcytidine with a 3'-phosphorothioate linkage
  modified_base 22: mod_base = OTHER; note = 2'-O-methyladenosine with a 3'-phosphorothioate linkage
  modified_base 23: mod_base = gm
tacaaccttggctggaatgacag

SEQ ID NO: 1760 - RNA, 21 nt, synthetic construct
  source 1..21: mol_type = other RNA
  modified_base 1: mod_base = OTHER; note = 2'-O-methylguanosine with a 3'-phosphorothioate linkage
  modified_base 2: mod_base = OTHER; note = 2'-O-methylcytidine with a 3'-phosphorothioate linkage
  modified_base 3: mod_base = um
  modified_base 4: mod_base = gm
  modified_base 5: mod_base = gm
  modified_base 6: mod_base = gm
  modified_base 7: mod_base = OTHER; note = 2'-O-methyladenosine
  modified_base 8: mod_base = gm
  modified_base 9: mod_base = OTHER; note = 2'-fluorocytidine
  modified_base 10: mod_base = OTHER; note = 2'-fluoroadenosine
  modified_base 11: mod_base = OTHER; note = 2'-fluorouridine
  modified_base 12: mod_base = OTHER; note = 2'-O-methyladenosine
  modified_base 13: mod_base = gm
  modified_base 14: mod_base = gm
  modified_base 15: mod_base = OTHER; note = 2'-O-methyladenosine
  modified_base 16: mod_base = gm
  modified_base 17: mod_base = gm
  modified_base 18: mod_base = cm
  modified_base 19: mod_base = OTHER; note = 2'-O-methyluridine with a 3'-phosphorothioate linkage
  modified_base 20: mod_base = OTHER; note = 2'-O-methyladenosine with a 3'-phosphorothioate linkage
  modified_base 21: mod_base = OTHER; note = 2'-O-methyladenosine
gctgggagcataggaggctaa

SEQ ID NO: 1761 - RNA, 23 nt, synthetic construct
  source 1..23: mol_type = other RNA
  modified_base 1: mod_base = OTHER; note = 2'-O-methyluridine with a 3'-phosphorothioate linkage and a 5'-phosphate substitution
  modified_base 2: mod_base = OTHER; note = 2'-fluorouridine with a 3'-phosphorothioate linkage
  modified_base 3: mod_base = OTHER; note = 2'-O-methyladenosine
  modified_base 4: mod_base = gm
  modified_base 5: mod_base = OTHER; note = 2'-fluorocytidine
  modified_base 6: mod_base = cm
  modified_base 7: mod_base = OTHER; note = 2'-fluorouridine
  modified_base 8: mod_base = cm
  modified_base 9: mod_base = cm
  modified_base 10: mod_base = um
  modified_base 11: mod_base = OTHER; note = 2'-O-methyladenosine
  modified_base 12: mod_base = um
  modified_base 13: mod_base = gm
  modified_base 14: mod_base = OTHER; note = 2'-fluorocytidine
  modified_base 15: mod_base = um
  modified_base 16: mod_base = OTHER; note = 2'-fluorocytidine
  modified_base 17: mod_base = cm
  modified_base 18: mod_base = cm
  modified_base 19: mod_base = OTHER; note = 2'-O-methyladenosine
  modified_base 20: mod_base = gm
  modified_base 21: mod_base = OTHER; note = 2'-O-methylcytidine with a 3'-phosphorothioate linkage
  modified_base 22: mod_base = OTHER; note = 2'-O-methylcytidine with a 3'-phosphorothioate linkage
  modified_base 23: mod_base = OTHER; note = 2'-O-methyladenosine
ttagcctcctatgctcccagcca

SEQ ID NO: 1762 - RNA, 21 nt, synthetic construct
  source 1..21: mol_type = other RNA
  modified_base 1: mod_base = OTHER; note = 2'-O-methylcytidine with a 3'-phosphorothioate linkage
  modified_base 2: mod_base = OTHER; note = 2'-O-methyluridine with a 3'-phosphorothioate linkage
  modified_base 3: mod_base = gm
  modified_base 4: mod_base = gm
  modified_base 5: mod_base = gm
  modified_base 6: mod_base = OTHER; note = 2'-O-methyladenosine
  modified_base 7: mod_base = gm
  modified_base 8: mod_base = cm
  modified_base 9: mod_base = OTHER; note = 2'-fluoroadenosine
  modified_base 10: mod_base = OTHER; note = 2'-fluorouridine
  modified_base 11: mod_base = OTHER; note = 2'-fluoroadenosine
  modified_base 12: mod_base = gm
  modified_base 13: mod_base = gm
  modified_base 14: mod_base = OTHER; note = 2'-O-methyladenosine
  modified_base 15: mod_base = gm
  modified_base 16: mod_base = gm
  modified_base 17: mod_base = cm
  modified_base 18: mod_base = um
  modified_base 19: mod_base = OTHER; note = 2'-O-methyladenosine with a 3'-phosphorothioate linkage
  modified_base 20: mod_base = OTHER; note = 2'-O-methylcytidine with a 3'-phosphorothioate linkage
  modified_base 21: mod_base = OTHER; note = 2'-O-methyladenosine
ctgggagcataggaggctaca

SEQ ID NO: 1763 - RNA, 23 nt, synthetic construct
  source 1..23: mol_type = other RNA
  modified_base 1: mod_base = OTHER; note = 2'-O-methyluridine with a 3'-phosphorothioate linkage and a 5'-phosphate substitution
  modified_base 2: mod_base = OTHER; note = 2'-fluoroguanosine with a 3'-phosphorothioate linkage
  modified_base 3: mod_base = um
  modified_base 4: mod_base = OTHER; note = 2'-O-methyladenosine
  modified_base 5: mod_base = OTHER; note = 2'-fluoroguanosine
  modified_base 6: mod_base = cm
  modified_base 7: mod_base = OTHER; note = 2'-fluorocytidine
  modified_base 8: mod_base = um
  modified_base 9: mod_base = cm
  modified_base 10: mod_base = cm
  modified_base 11: mod_base = um
  modified_base 12: mod_base = OTHER; note = 2'-O-methyladenosine
  modified_base 13: mod_base = um
  modified_base 14: mod_base = OTHER; note = 2'-fluoroguanosine
  modified_base 15: mod_base = cm
  modified_base 16: mod_base = OTHER; note = 2'-fluorouridine
  modified_base 17: mod_base = cm
  modified_base 18: mod_base = cm
  modified_base 19: mod_base = cm
  modified_base 20: mod_base = OTHER; note = 2'-O-methyladenosine
  modified_base 21: mod_base = OTHER; note = 2'-O-methylguanosine with a 3'-phosphorothioate linkage
  modified_base 22: mod_base = OTHER; note = 2'-O-methylcytidine with a 3'-phosphorothioate linkage
  modified_base 23: mod_base = cm
tgtagcctcctatgctcccagcc

SEQ ID NO: 1764 - RNA, 21 nt, synthetic construct
  source 1..21: mol_type = other RNA
  modified_base 1: mod_base = OTHER; note = 2'-O-methylguanosine with a 3'-phosphorothioate linkage
  modified_base 2: mod_base = OTHER; note = 2'-O-methylguanosine with a 3'-phosphorothioate linkage
  modified_base 3: mod_base = gm
  modified_base 4: mod_base = OTHER; note = 2'-O-methyladenosine
  modified_base 5: mod_base = gm
  modified_base 6: mod_base = cm
  modified_base 7: mod_base = OTHER; note = 2'-O-methyladenosine
  modified_base 8: mod_base = um
  modified_base 9: mod_base = OTHER; note = 2'-fluoroadenosine
  modified_base 10: mod_base = OTHER; note = 2'-fluoroguanosine
  modified_base 11: mod_base = OTHER; note = 2'-fluoroguanosine
  modified_base 12: mod_base = OTHER; note = 2'-O-methyladenosine
  modified_base 13: mod_base = gm
  modified_base 14: mod_base = gm
  modified_base 15: mod_base = cm
  modified_base 16: mod_base = um
  modified_base 17: mod_base = OTHER; note = 2'-O-methyladenosine
  modified_base 18: mod_base = cm
  modified_base 19: mod_base = OTHER; note = 2'-O-methyladenosine with a 3'-phosphorothioate linkage
  modified_base 20: mod_base = OTHER; note = 2'-O-methyladenosine with a 3'-phosphorothioate linkage
  modified_base 21: mod_base = OTHER; note = 2'-O-methyladenosine
gggagcataggaggctacaaa

SEQ ID NO: 1765 - RNA, 23 nt, synthetic construct
  source 1..23: mol_type = other RNA
  modified_base 1: mod_base = OTHER; note = 2'-O-methyluridine with a 3'-phosphorothioate linkage and a 5'-phosphate substitution
  modified_base 2: mod_base = OTHER; note = 2'-fluorouridine with a 3'-phosphorothioate linkage
  modified_base 3: mod_base = um
  modified_base 4: mod_base = gm
  modified_base 5: mod_base = OTHER; note = 2'-fluorouridine
  modified_base 6: mod_base = OTHER; note = 2'-O-methyladenosine
  modified_base 7: mod_base = OTHER; note = 2'-fluoroguanosine
  modified_base 8: mod_base = cm
  modified_base 9: mod_base = cm
  modified_base 10: mod_base = um
  modified_base 11: mod_base = cm
  modified_base 12: mod_base = cm
  modified_base 13: mod_base = um
  modified_base 14: mod_base = OTHER; note = 2'-fluoroadenosine
  modified_base 15: mod_base = um
  modified_base 16: mod_base = OTHER; note = 2'-fluoroguanosine
  modified_base 17: mod_base = cm
  modified_base 18: mod_base = um
  modified_base 19: mod_base = cm
  modified_base 20: mod_base = cm
  modified_base 21: mod_base = OTHER; note = 2'-O-methylcytidine with a 3'-phosphorothioate linkage
  modified_base 22: mod_base = OTHER; note = 2'-O-methyladenosine with a 3'-phosphorothioate linkage
  modified_base 23: mod_base = gm
tttgtagcctcctatgctcccag

SEQ ID NO: 1766 - RNA, 21 nt, synthetic construct
  source 1..21: mol_type = other RNA
  modified_base 1: mod_base = OTHER; note = 2'-O-methylguanosine with a 3'-phosphorothioate linkage
  modified_base 2: mod_base = OTHER; note = 2'-O-methylguanosine with a 3'-phosphorothioate linkage
  modified_base 3: mod_base = OTHER; note = 2'-O-methyladenosine
  modified_base 4: mod_base = gm
  modified_base 5: mod_base = cm
  modified_base 6: mod_base = OTHER; note = 2'-O-methyladenosine
  modified_base 7: mod_base = um
  modified_base 8: mod_base = OTHER; note = 2'-O-methyladenosine
  modified_base 9: mod_base = OTHER; note = 2'-fluoroguanosine
  modified_base 10: mod_base = OTHER; note = 2'-fluoroguanosine
  modified_base 11: mod_base = OTHER; note = 2'-fluoroadenosine
  modified_base 12: mod_base = gm
  modified_base 13: mod_base = gm
  modified_base 14: mod_base = cm
  modified_base 15: mod_base = um
  modified_base 16: mod_base = OTHER; note = 2'-O-methyladenosine
  modified_base 17: mod_base = cm
  modified_base 18: mod_base = OTHER; note = 2'-O-methyladenosine
  modified_base 19: mod_base = OTHER; note = 2'-O-methyladenosine with a 3'-phosphorothioate linkage
  modified_base 20: mod_base = OTHER; note = 2'-O-methylcytidine with a 3'-phosphorothioate linkage
  modified_base 21: mod_base = OTHER; note = 2'-O-methyladenosine
ggagcataggaggctacaaca

SEQ ID NO: 1767 - RNA, 23 nt, synthetic construct
  source 1..23: mol_type = other RNA
  modified_base 1: mod_base = OTHER; note = 2'-O-methyluridine with a 3'-phosphorothioate linkage and a 5'-phosphate substitution
  modified_base 2: mod_base = OTHER; note = 2'-fluoroguanosine with a 3'-phosphorothioate linkage
  modified_base 3: mod_base = um
  modified_base 4: mod_base = um
  modified_base 5: mod_base = OTHER; note = 2'-fluoroguanosine
  modified_base 6: mod_base = um
  modified_base 7: mod_base = OTHER; note = 2'-fluoroadenosine
  modified_base 8: mod_base = gm
  modified_base 9: mod_base = cm
  modified_base 10: mod_base = cm
  modified_base 11: mod_base = um
  modified_base 12: mod_base = cm
  modified_base 13: mod_base = cm
  modified_base 14: mod_base = OTHER; note = 2'-fluorouridine
  modified_base 15: mod_base = OTHER; note = 2'-O-methyladenosine
  modified_base 16: mod_base = OTHER; note = 2'-fluorouridine
  modified_base 17: mod_base = gm
  modified_base 18: mod_base = cm
  modified_base 19: mod_base = um
  modified_base 20: mod_base = cm
  modified_base 21: mod_base = OTHER; note = 2'-O-methylcytidine with a 3'-phosphorothioate linkage
  modified_base 22: mod_base = OTHER; note = 2'-O-methylcytidine with a 3'-phosphorothioate linkage
  modified_base 23: mod_base = OTHER; note = 2'-O-methyladenosine
tgttgtagcctcctatgctccca

SEQ ID NO: 1768 - RNA, 21 nt, synthetic construct
  source 1..21: mol_type = other RNA
  modified_base 1: mod_base = OTHER; note = 2'-O-methyladenosine with a 3'-phosphorothioate linkage
  modified_base 2: mod_base = OTHER; note = 2'-O-methylguanosine with a 3'-phosphorothioate linkage
  modified_base 3: mod_base = cm
  modified_base 4: mod_base = OTHER; note = 2'-O-methyladenosine
  modified_base 5: mod_base = um
  modified_base 6: mod_base = OTHER; note = 2'-O-methyladenosine
  modified_base 7: mod_base = gm
  modified_base 8: mod_base = gm
  modified_base 9: mod_base = OTHER; note = 2'-fluoroadenosine
  modified_base 10: mod_base = OTHER; note = 2'-fluoroguanosine
  modified_base 11: mod_base = OTHER; note = 2'-fluoroguanosine
  modified_base 12: mod_base = cm
  modified_base 13: mod_base = um
  modified_base 14: mod_base = OTHER; note = 2'-O-methyladenosine
  modified_base 15: mod_base = cm
  modified_base 16: mod_base = OTHER; note = 2'-O-methyladenosine
  modified_base 17: mod_base = OTHER; note = 2'-O-methyladenosine
  modified_base 18: mod_base = cm
  modified_base 19: mod_base = OTHER; note = 2'-O-methylguanosine with a 3'-phosphorothioate linkage
  modified_base 20: mod_base = OTHER; note = 2'-O-methylcytidine with a 3'-phosphorothioate linkage
  modified_base 21: mod_base = OTHER; note = 2'-O-methyladenosine
agcataggaggctacaacgca

SEQ ID NO: 1769 - RNA, 23 nt, synthetic construct
  source 1..23: mol_type = other RNA
  modified_base 1: mod_base = OTHER; note = 2'-O-methyluridine with a 3'-phosphorothioate linkage and a 5'-phosphate substitution
  modified_base 2: mod_base = OTHER; note = 2'-fluoroguanosine with a 3'-phosphorothioate linkage
  modified_base 3: mod_base = cm
  modified_base 4: mod_base = gm
  modified_base 5: mod_base = OTHER; note = 2'-fluorouridine
  modified_base 6: mod_base = um
  modified_base 7: mod_base = OTHER; note = 2'-fluoroguanosine
  modified_base 8: mod_base = um
  modified_base 9: mod_base = OTHER; note = 2'-O-methyladenosine
  modified_base 10: mod_base = gm
  modified_base 11: mod_base = cm
  modified_base 12: mod_base = cm
  modified_base 13: mod_base = um
  modified_base 14: mod_base = OTHER; note = 2'-fluorocytidine
  modified_base 15: mod_base = cm
  modified_base 16: mod_base = OTHER; note = 2'-fluorouridine
  modified_base 17: mod_base = OTHER; note = 2'-O-methyladenosine
  modified_base 18: mod_base = um
  modified_base 19: mod_base = gm
  modified_base 20: mod_base = cm
  modified_base 21: mod_base = OTHER; note = 2'-O-methyluridine with a 3'-phosphorothioate linkage
  modified_base 22: mod_base = OTHER; note = 2'-O-methylcytidine with a 3'-phosphorothioate linkage
  modified_base 23: mod_base = cm
tgcgttgtagcctcctatgctcc

SEQ ID NO: 1770 - RNA, 21 nt, synthetic construct
  source 1..21: mol_type = other RNA
  modified_base 1: mod_base = OTHER; note = 2'-O-methylguanosine with a 3'-phosphorothioate linkage
  modified_base 2: mod_base = OTHER; note = 2'-O-methylcytidine with a 3'-phosphorothioate linkage
  modified_base 3: mod_base = OTHER; note = 2'-O-methyladenosine
  modified_base 4: mod_base = um
  modified_base 5: mod_base = OTHER; note = 2'-O-methyladenosine
  modified_base 6: mod_base = gm
  modified_base 7: mod_base = gm
  modified_base 8: mod_base = OTHER; note = 2'-O-methyladenosine
  modified_base 9: mod_base = OTHER; note = 2'-fluoroguanosine
  modified_base 10: mod_base = OTHER; note = 2'-fluoroguanosine
  modified_base 11: mod_base = OTHER; note = 2'-fluorocytidine
  modified_base 12: mod_base = um
  modified_base 13: mod_base = OTHER; note = 2'-O-methyladenosine
  modified_base 14: mod_base = cm
  modified_base 15: mod_base = OTHER; note = 2'-O-methyladenosine
  modified_base 16: mod_base = OTHER; note = 2'-O-methyladenosine
  modified_base 17: mod_base = cm
  modified_base 18: mod_base = gm
  modified_base 19: mod_base = OTHER; note = 2'-O-methylcytidine with a 3'-phosphorothioate linkage
  modified_base 20: mod_base = OTHER; note = 2'-O-methylcytidine with a 3'-phosphorothioate linkage
  modified_base 21: mod_base = OTHER; note = 2'-O-methyladenosine
gcataggaggctacaacgcca

SEQ ID NO: 1771 - RNA, 23 nt, synthetic construct
  source 1..23: mol_type = other RNA
  modified_base 1: mod_base = OTHER; note = 2'-O-methyluridine with a 3'-phosphorothioate linkage and a 5'-phosphate substitution
  modified_base 2: mod_base = OTHER; note = 2'-fluoroguanosine with a 3'-phosphorothioate linkage
  modified_base 3: mod_base = gm
  modified_base 4: mod_base = cm
  modified_base 5: mod_base = OTHER; note = 2'-fluoroguanosine
  modified_base 6: mod_base = um
  modified_base 7: mod_base = OTHER; note = 2'-fluorouridine
  modified_base 8: mod_base = gm
  modified_base 9: mod_base = um
  modified_base 10: mod_base = OTHER; note = 2'-O-methyladenosine
  modified_base 11: mod_base = gm
  modified_base 12: mod_base = cm
  modified_base 13: mod_base = cm
  modified_base 14: mod_base = OTHER; note = 2'-fluorouridine
  modified_base 15: mod_base = cm
  modified_base 16: mod_base = OTHER; note = 2'-fluorocytidine
  modified_base 17: mod_base = um
  modified_base 18: mod_base = OTHER; note = 2'-O-methyladenosine
  modified_base 19: mod_base = um
  modified_base 20: mod_base = gm
  modified_base 21: mod_base = OTHER; note = 2'-O-methylcytidine with a 3'-phosphorothioate linkage
  modified_base 22: mod_base = OTHER; note = 2'-O-methyluridine with a 3'-phosphorothioate linkage
  modified_base 23: mod_base = cm
tggcgttgtagcctcctatgctc

SEQ ID NO: 1772 - RNA, 21 nt, synthetic construct
  source 1..21: mol_type = other RNA
  modified_base 1: mod_base = OTHER; note = 2'-O-methylcytidine with a 3'-phosphorothioate linkage
  modified_base 2: mod_base = OTHER; note = 2'-O-methyladenosine with a 3'-phosphorothioate linkage
  modified_base 3: mod_base = um
  modified_base 4: mod_base = OTHER; note = 2'-O-methyladenosine
  modified_base 5: mod_base = gm
  modified_base 6: mod_base = gm
  modified_base 7: mod_base = OTHER; note = 2'-O-methyladenosine
  modified_base 8: mod_base = gm
  modified_base 9: mod_base = OTHER; note = 2'-fluoroguanosine
  modified_base 10: mod_base = OTHER; note = 2'-fluorocytidine
  modified_base 11: mod_base = OTHER; note = 2'-fluorouridine
  modified_base 12: mod_base = OTHER; note = 2'-O-methyladenosine
  modified_base 13: mod_base = cm
  modified_base 14: mod_base = OTHER; note = 2'-O-methyladenosine
  modified_base 15: mod_base = OTHER; note = 2'-O-methyladenosine
  modified_base 16: mod_base = cm
  modified_base 17: mod_base = gm
  modified_base 18: mod_base = cm
  modified_base 19: mod_base = OTHER; note = 2'-O-methylcytidine with a 3'-phosphorothioate linkage
  modified_base 20: mod_base = OTHER; note = 2'-O-methylcytidine with a 3'-phosphorothioate linkage
  modified_base 21: mod_base = OTHER; note = 2'-O-methyladenosine
cataggaggctacaacgccca

SEQ ID NO: 1773 - RNA, 23 nt, synthetic construct
  source 1..23: mol_type = other RNA
  modified_base 1: mod_base = OTHER; note = 2'-O-methyluridine with a 3'-phosphorothioate linkage and a 5'-phosphate substitution
  modified_base 2: mod_base = OTHER; note = 2'-fluoroguanosine with a 3'-phosphorothioate linkage
  modified_base 3: mod_base = gm
  modified_base 4: mod_base = gm
  modified_base 5: mod_base = OTHER; note = 2'-fluorocytidine
  modified_base 6: mod_base = gm
  modified_base 7: mod_base = OTHER; note = 2'-fluorouridine
  modified_base 8: mod_base = um
  modified_base 9: mod_base = gm
  modified_base 10: mod_base = um
  modified_base 11: mod_base = OTHER; note = 2'-O-methyladenosine
  modified_base 12: mod_base = gm
  modified_base 13: mod_base = cm
  modified_base 14: mod_base = OTHER; note = 2'-fluorocytidine
  modified_base 15: mod_base = um
  modified_base 16: mod_base = OTHER; note = 2'-fluorocytidine
  modified_base 17: mod_base = cm
  modified_base 18: mod_base = um
  modified_base 19: mod_base = OTHER; note = 2'-O-methyladenosine
  modified_base 20: mod_base = um
  modified_base 21: mod_base = OTHER; note = 2'-O-methylguanosine with a 3'-phosphorothioate linkage
  modified_base 22: mod_base = OTHER; note = 2'-O-methylcytidine with a 3'-phosphorothioate linkage
  modified_base 23: mod_base = um
tgggcgttgtagcctcctatgct

SEQ ID NO: 1774 - RNA, 21 nt, synthetic construct
  source 1..21: mol_type = other RNA
  modified_base 1: mod_base = OTHER; note = 2'-O-methyladenosine with a 3'-phosphorothioate linkage
  modified_base 2: mod_base = OTHER; note = 2'-O-methyluridine with a 3'-phosphorothioate linkage
  modified_base 3: mod_base = OTHER; note = 2'-O-methyladenosine
  modified_base 4: mod_base = gm
  modified_base 5: mod_base = gm
  modified_base 6: mod_base = OTHER; note = 2'-O-methyladenosine
  modified_base 7: mod_base = gm
  modified_base 8: mod_base = gm
  modified_base 9: mod_base = OTHER; note = 2'-fluorocytidine
  modified_base 10: mod_base = OTHER; note = 2'-fluorouridine
  modified_base 11: mod_base = OTHER; note = 2'-fluoroadenosine
  modified_base 12: mod_base = cm
  modified_base 13: mod_base = OTHER; note = 2'-O-methyladenosine
  modified_base 14: mod_base = OTHER; note = 2'-O-methyladenosine
  modified_base 15: mod_base = cm
  modified_base 16: mod_base = gm
  modified_base 17: mod_base = cm
  modified_base 18: mod_base = cm
  modified_base 19: mod_base = OTHER; note = 2'-O-methylcytidine with a 3'-phosphorothioate linkage
  modified_base 20: mod_base = OTHER; note = 2'-O-methyladenosine with a 3'-phosphorothioate linkage
  modified_base 21: mod_base = OTHER; note = 2'-O-methyladenosine
ataggaggctacaacgcccaa

SEQ ID NO: 1775 - RNA, 23 nt, synthetic construct
  source 1..23: mol_type = other RNA
  modified_base 1: mod_base = OTHER; note = 2'-O-methyluridine with a 3'-phosphorothioate linkage and a 5'-phosphate substitution
  modified_base 2: mod_base = OTHER; note = 2'-fluorouridine with a 3'-phosphorothioate linkage
  modified_base 3: mod_base = gm
  modified_base 4: mod_base = gm
  modified_base 5: mod_base = OTHER; note = 2'-fluoroguanosine
  modified_base 6: mod_base = cm
  modified_base 7: mod_base = OTHER; note = 2'-fluoroguanosine
  modified_base 8: mod_base = um
  modified_base 9: mod_base = um
  modified_base 10: mod_base = gm
  modified_base 11: mod_base = um
  modified_base 12: mod_base = OTHER; note = 2'-O-methyladenosine
  modified_base 13: mod_base = gm
  modified_base 14: mod_base = OTHER; note = 2'-fluorocytidine
  modified_base 15: mod_base = cm
  modified_base 16: mod_base = OTHER; note = 2'-fluorouridine
  modified_base 17: mod_base = cm
  modified_base 18: mod_base = cm
  modified_base 19: mod_base = um
  modified_base 20: mod_base = OTHER; note = 2'-O-methyladenosine
  modified_base 21: mod_base = OTHER; note = 2'-O-methyluridine with a 3'-phosphorothioate linkage
  modified_base 22: mod_base = OTHER; note = 2'-O-methylguanosine with a 3'-phosphorothioate linkage
  modified_base 23: mod_base = cm
ttgggcgttgtagcctcctatgc

SEQ ID NO: 1776 - RNA, 21 nt, synthetic construct
  source 1..21: mol_type = other RNA
  modified_base 1: mod_base = OTHER; note = 2'-O-methylguanosine with a 3'-phosphorothioate linkage
  modified_base 2: mod_base = OTHER; note = 2'-O-methyladenosine with a 3'-phosphorothioate linkage
  modified_base 3: mod_base = gm
  modified_base 4: mod_base = gm
  modified_base 5: mod_base = cm
  modified_base 6: mod_base = um
  modified_base 7: mod_base = OTHER; note = 2'-O-methyladenosine
  modified_base 8: mod_base = cm
  modified_base 9: mod_base = OTHER; note = 2'-fluoroadenosine
  modified_base 10: mod_base = OTHER; note = 2'-fluoroadenosine
  modified_base 11: mod_base = OTHER; note = 2'-fluorocytidine
  modified_base 12: mod_base = gm
  modified_base 13: mod_base = cm
  modified_base 14: mod_base = cm
  modified_base 15: mod_base = cm
  modified_base 16: mod_base = OTHER; note = 2'-O-methyladenosine
  modified_base 17: mod_base = um
  modified_base 18: mod_base = gm
  modified_base 19: mod_base = OTHER; note = 2'-O-methylcytidine with a 3'-phosphorothioate linkage
  modified_base 20: mod_base = OTHER; note = 2'-O-methyladenosine with a 3'-phosphorothioate linkage
  modified_base 21: mod_base = OTHER; note = 2'-O-methyladenosine
gaggctacaacgcccatgcaa

SEQ ID NO: 1777 - RNA, 23 nt, synthetic construct
  source 1..23: mol_type = other RNA
  modified_base 1: mod_base = OTHER; note = 2'-O-methyluridine with a 3'-phosphorothioate linkage and a 5'-phosphate substitution
  modified_base 2: mod_base = OTHER; note = 2'-fluorouridine with a 3'-phosphorothioate linkage
  modified_base 3: mod_base = gm
  modified_base 4: mod_base = cm
  modified_base 5: mod_base = OTHER; note = 2'-fluoroadenosine
  modified_base 6: mod_base = um
  modified_base 7: mod_base = OTHER; note = 2'-fluoroguanosine
  modified_base 8: mod_base = gm
  modified_base 9: mod_base = gm
  modified_base 10: mod_base = cm
  modified_base 11: mod_base = gm
  modified_base 12: mod_base = um
  modified_base 13: mod_base = um
  modified_base 14: mod_base = OTHER; note = 2'-fluoroguanosine
  modified_base 15: mod_base = um
  modified_base 16: mod_base = OTHER; note = 2'-fluoroadenosine
  modified_base 17: mod_base = gm
  modified_base 18: mod_base = cm
  modified_base 19: mod_base = cm
  modified_base 20: mod_base = um
  modified_base 21: mod_base = OTHER; note = 2'-O-methylcytidine with a 3'-phosphorothioate linkage
  modified_base 22: mod_base = OTHER; note = 2'-O-methylcytidine with a 3'-phosphorothioate linkage
  modified_base 23: mod_base = um
ttgcatgggcgttgtagcctcct

SEQ ID NO: 1778 - RNA, 21 nt, synthetic construct
  source 1..21: mol_type = other RNA
  modified_base 1: mod_base = OTHER; note = 2'-O-methylguanosine with a 3'-phosphorothioate linkage
  modified_base 2: mod_base = OTHER; note = 2'-O-methylguanosine with a 3'-phosphorothioate linkage
  modified_base 3: mod_base = cm
  modified_base 4: mod_base = um
  modified_base 5: mod_base = OTHER; note = 2'-O-methyladenosine
  modified_base 6: mod_base = cm
  modified_base 7: mod_base = OTHER; note = 2'-O-methyladenosine
  modified_base 8: mod_base = OTHER; note = 2'-O-methyladenosine
  modified_base 9: mod_base = OTHER; note = 2'-fluorocytidine
  modified_base 10: mod_base = OTHER; note = 2'-fluoroguanosine
  modified_base 11: mod_base = OTHER; note = 2'-fluorocytidine
  modified_base 12: mod_base = cm
  modified_base 13: mod_base = cm
  modified_base 14: mod_base = OTHER; note = 2'-O-methyladenosine
  modified_base 15: mod_base = um
  modified_base 16: mod_base = gm
  modified_base 17: mod_base = cm
  modified_base 18: mod_base = OTHER; note = 2'-O-methyladenosine
  modified_base 19: mod_base = OTHER; note = 2'-O-methylguanosine with a 3'-phosphorothioate linkage
  modified_base 20: mod_base = OTHER; note = 2'-O-methylcytidine with a 3'-phosphorothioate linkage
  modified_base 21: mod_base = OTHER; note = 2'-O-methyladenosine
ggctacaacgcccatgcagca

SEQ ID NO: 1779 - RNA, 23 nt, synthetic construct
  source 1..23: mol_type = other RNA
  modified_base 1: mod_base = OTHER; note = 2'-O-methyluridine with a 3'-phosphorothioate linkage and a 5'-phosphate substitution
  modified_base 2: mod_base = OTHER; note = 2'-fluoroguanosine with a 3'-phosphorothioate linkage
  modified_base 3: mod_base = cm
  modified_base 4: mod_base = um
  modified_base 5: mod_base = OTHER; note = 2'-fluoroguanosine
  modified_base 6: mod_base = cm
  modified_base 7: mod_base = OTHER; note = 2'-fluoroadenosine
  modified_base 8: mod_base = um
  modified_base 9: mod_base = gm
  modified_base 10: mod_base = gm
  modified_base 11: mod_base = gm
  modified_base 12: mod_base = cm
  modified_base 13: mod_base = gm
  modified_base 14: mod_base = OTHER; note = 2'-fluorouridine
  modified_base 15: mod_base = um
  modified_base 16: mod_base = OTHER; note = 2'-fluoroguanosine
  modified_base 17: mod_base = um
  modified_base 18: mod_base = OTHER; note = 2'-O-methyladenosine
  modified_base 19: mod_base = gm
  modified_base 20: mod_base = cm
  modified_base 21: mod_base = OTHER; note = 2'-O-methylcytidine with a 3'-phosphorothioate linkage
  modified_base 22: mod_base = OTHER; note = 2'-O-methyluridine with a 3'-phosphorothioate linkage
  modified_base 23: mod_base = cm
tgctgcatgggcgttgtagcctc

SEQ ID NO: 1780 - RNA, 21 nt, synthetic construct
  source 1..21: mol_type = other RNA
  modified_base 1: mod_base = OTHER; note = 2'-O-methylguanosine with a 3'-phosphorothioate linkage
  modified_base 2: mod_base = OTHER; note = 2'-O-methylcytidine with a 3'-phosphorothioate linkage
  modified_base 3: mod_base = um
  modified_base 4: mod_base = OTHER; note = 2'-O-methyladenosine
  modified_base 5: mod_base = cm
  modified_base 6: mod_base = OTHER; note = 2'-O-methyladenosine
  modified_base 7: mod_base = OTHER; note = 2'-O-methyladenosine
  modified_base 8: mod_base = cm
  modified_base 9: mod_base = OTHER; note = 2'-fluoroguanosine
  modified_base 10: mod_base = OTHER; note = 2'-fluorocytidine
  modified_base 11: mod_base = OTHER; note = 2'-fluorocytidine
  modified_base 12: mod_base = cm
  modified_base 13: mod_base = OTHER; note = 2'-O-methyladenosine
  modified_base 14: mod_base = um
  modified_base 15: mod_base = gm
  modified_base 16: mod_base = cm
  modified_base 17: mod_base = OTHER; note = 2'-O-methyladenosine
  modified_base 18: mod_base = gm
  modified_base 19: mod_base = OTHER; note = 2'-O-methylcytidine with a 3'-phosphorothioate linkage
  modified_base 20: mod_base = OTHER; note = 2'-O-methyladenosine with a 3'-phosphorothioate linkage
  modified_base 21: mod_base = OTHER; note = 2'-O-methyladenosine
gctacaacgcccatgcagcaa

SEQ ID NO: 1781 - RNA, 23 nt, synthetic construct
  source 1..23: mol_type = other RNA
  modified_base 1: mod_base = OTHER; note = 2'-O-methyluridine with a 3'-phosphorothioate linkage and a 5'-phosphate substitution
  modified_base 2: mod_base = OTHER; note = 2'-fluorouridine with a 3'-phosphorothioate linkage
  modified_base 3: mod_base = gm
  modified_base 4: mod_base = cm
  modified_base 5: mod_base = OTHER; note = 2'-fluorouridine
  modified_base 6: mod_base = gm
  modified_base 7: mod_base = OTHER; note = 2'-fluorocytidine
  modified_base 8: mod_base = OTHER; note = 2'-O-methyladenosine
  modified_base 9: mod_base = um
  modified_base 10: mod_base = gm
  modified_base 11: mod_base = gm
  modified_base 12: mod_base = gm
  modified_base 13: mod_base = cm
  modified_base 14: mod_base = OTHER; note = 2'-fluoroguanosine
  modified_base 15: mod_base = um
  modified_base 16: mod_base = OTHER; note = 2'-fluorouridine
  modified_base 17: mod_base = gm
  modified_base 18: mod_base = um
  modified_base 19: mod_base = OTHER; note = 2'-O-methyladenosine
  modified_base 20: mod_base = gm
  modified_base 21: mod_base = OTHER; note = 2'-O-methylcytidine with a 3'-phosphorothioate linkage
  modified_base 22: mod_base = OTHER; note = 2'-O-methylcytidine with a 3'-phosphorothioate linkage
  modified_base 23: mod_base = um
ttgctgcatgggcgttgtagcct

SEQ ID NO: 1782 - RNA, 21 nt, synthetic construct
  source 1..21: mol_type = other RNA
  modified_base 1: mod_base = OTHER; note = 2'-O-methylcytidine with a 3'-phosphorothioate linkage
  modified_base 2: mod_base = OTHER; note = 2'-O-methyluridine with a 3'-phosphorothioate linkage
  modified_base 3: mod_base = OTHER; note = 2'-O-methyladenosine
  modified_base 4: mod_base = cm
  modified_base 5: mod_base = OTHER; note = 2'-O-methyladenosine
  modified_base 6: mod_base = OTHER; note = 2'-O-methyladenosine
  modified_base 7: mod_base = cm
  modified_base 8: mod_base = gm
  modified_base 9: mod_base = OTHER; note = 2'-fluorocytidine
  modified_base 10: mod_base = OTHER; note = 2'-fluorocytidine
  modified_base 11: mod_base = OTHER; note = 2'-fluorocytidine
  modified_base 12: mod_base = OTHER; note = 2'-O-methyladenosine
  modified_base 13: mod_base = um
  modified_base 14: mod_base = gm
  modified_base 15: mod_base = cm
  modified_base 16: mod_base = OTHER; note = 2'-O-methyladenosine
  modified_base 17: mod_base = gm
  modified_base 18: mod_base = cm
  modified_base 19: mod_base = OTHER; note = 2'-O-methyladenosine with a 3'-phosphorothioate linkage
  modified_base 20: mod_base = OTHER; note = 2'-O-methyladenosine with a 3'-phosphorothioate linkage
  modified_base 21: mod_base = OTHER; note = 2'-O-methyladenosine
ctacaacgcccatgcagcaaa

SEQ ID NO: 1783 - RNA, 23 nt, synthetic construct
  source 1..23: mol_type = other RNA
  modified_base 1: mod_base = OTHER; note = 2'-O-methyluridine with a 3'-phosphorothioate linkage and a 5'-phosphate substitution
  modified_base 2: mod_base = OTHER; note = 2'-fluorouridine with a 3'-phosphorothioate linkage
  modified_base 3: mod_base = um
  modified_base 4: mod_base = gm
  modified_base 5: mod_base = OTHER; note = 2'-fluorocytidine
  modified_base 6: mod_base = um
  modified_base 7: mod_base = OTHER; note = 2'-fluoroguanosine
  modified_base 8: mod_base = cm
  modified_base 9: mod_base = OTHER; note = 2'-O-methyladenosine
  modified_base 10: mod_base = um
  modified_base 11: mod_base = gm
  modified_base 12: mod_base = gm
  modified_base 13: mod_base = gm
  modified_base 14: mod_base = OTHER; note = 2'-fluorocytidine
  modified_base 15: mod_base = gm
  modified_base 16: mod_base = OTHER; note = 2'-fluorouridine
  modified_base 17: mod_base = um
  modified_base 18: mod_base = gm
  modified_base 19: mod_base = um
  modified_base 20: mod_base = OTHER; note = 2'-O-methyladenosine
  modified_base 21: mod_base = OTHER; note = 2'-O-methylguanosine with a 3'-phosphorothioate linkage
  modified_base 22: mod_base = OTHER; note = 2'-O-methylcytidine with a 3'-phosphorothioate linkage
  modified_base 23: mod_base = cm
tttgctgcatgggcgttgtagcc

SEQ ID NO: 1784 - RNA, 21 nt, synthetic construct
  source 1..21: mol_type = other RNA
  modified_base 1: mod_base = OTHER; note = 2'-O-methyladenosine with a 3'-phosphorothioate linkage
  modified_base 2: mod_base = OTHER; note = 2'-O-methylcytidine with a 3'-phosphorothioate linkage
  modified_base 3: mod_base = OTHER; note = 2'-O-methyladenosine
  modified_base 4: mod_base = OTHER; note = 2'-O-methyladenosine
  modified_base 5: mod_base = cm
  modified_base 6: mod_base = gm
  modified_base 7: mod_base = cm
  modified_base 8: mod_base = cm
  modified_base 9: mod_base = OTHER; note = 2'-fluorocytidine
  modified_base 10: mod_base = OTHER; note = 2'-fluoroadenosine
  modified_base 11: mod_base = OTHER; note = 2'-fluorouridine
  modified_base 12: mod_base = gm
  modified_base 13: mod_base = cm
  modified_base 14: mod_base = OTHER; note = 2'-O-methyladenosine
  modified_base 15: mod_base = gm
  modified_base 16: mod_base = cm
  modified_base 17: mod_base = OTHER; note = 2'-O-methyladenosine
  modified_base 18: mod_base = OTHER; note = 2'-O-methyladenosine
  modified_base 19: mod_base = OTHER; note = 2'-O-methyladenosine with a 3'-phosphorothioate linkage
  modified_base 20: mod_base = OTHER; note = 2'-O-methylcytidine with a 3'-phosphorothioate linkage
  modified_base 21: mod_base = OTHER; note = 2'-O-methyladenosine
acaacgcccatgcagcaaaca

SEQ ID NO: 1785 - RNA, 23 nt, synthetic construct
  source 1..23: mol_type = other RNA
  modified_base 1: mod_base = OTHER; note = 2'-O-methyluridine with a 3'-phosphorothioate linkage and a 5'-phosphate substitution
  modified_base 2: mod_base = OTHER; note = 2'-fluoroguanosine with a 3'-phosphorothioate linkage
  modified_base 3: mod_base = um
  modified_base 4: mod_base = um
  modified_base 5: mod_base = OTHER; note = 2'-fluorouridine
  modified_base 6: mod_base = gm
  modified_base 7: mod_base = OTHER; note = 2'-fluorocytidine
  modified_base 8: mod_base = um
  modified_base 9: mod_base = gm
  modified_base 10: mod_base = cm
  modified_base 11: mod_base = OTHER; note = 2'-O-methyladenosine
  modified_base 12: mod_base = um
  modified_base 13: mod_base = gm
  modified_base 14: mod_base = OTHER; note = 2'-fluoroguanosine
  modified_base 15: mod_base = gm
  modified_base 16: mod_base = OTHER; note = 2'-fluorocytidine
  modified_base 17: mod_base = gm
  modified_base 18: mod_base = um
  modified_base 19: mod_base = um
  modified_base 20: mod_base = gm
  modified_base 21: mod_base = OTHER; note = 2'-O-methyluridine with a 3'-phosphorothioate linkage
  modified_base 22: mod_base = OTHER; note = 2'-O-methyladenosine with a 3'-phosphorothioate linkage
  modified_base 23: mod_base = gm
tgtttgctgcatgggcgttgtag

SEQ ID NO: 1786 - RNA, 21 nt, synthetic construct
  source 1..21: mol_type = other RNA
  modified_base 1: mod_base = OTHER; note = 2'-O-methylcytidine with a 3'-phosphorothioate linkage
  modified_base 2: mod_base = OTHER; note = 2'-O-methyladenosine with a 3'-phosphorothioate linkage
  modified_base 3: mod_base = OTHER; note = 2'-O-methyladenosine
  modified_base 4: mod_base = cm
  modified_base 5: mod_base = gm
  modified_base 6: mod_base = cm
  modified_base 7: mod_base = cm
  modified_base 8: mod_base = cm
  modified_base 9: mod_base = OTHER; note = 2'-fluoroadenosine
  modified_base 10: mod_base = OTHER; note = 2'-fluorouridine
  modified_base 11: mod_base = OTHER; note = 2'-fluoroguanosine
  modified_base 12: mod_base = cm
  modified_base 13: mod_base = OTHER; note = 2'-O-methyladenosine
  modified_base 14: mod_base = gm
  modified_base 15: mod_base = cm
  modified_base 16: mod_base = OTHER; note = 2'-O-methyladenosine
  modified_base 17: mod_base = OTHER; note = 2'-O-methyladenosine
  modified_base 18: mod_base = OTHER; note = 2'-O-methyladenosine
  modified_base 19: mod_base = OTHER; note = 2'-O-methylcytidine with a 3'-phosphorothioate linkage
  modified_base 20: mod_base = OTHER; note = 2'-O-methyladenosine with a 3'-phosphorothioate linkage
  modified_base 21: mod_base = OTHER; note = 2'-O-methyladenosine
caacgcccatgcagcaaacaa

SEQ ID NO: 1787 - RNA, 23 nt, synthetic construct
  source 1..23: mol_type = other RNA
  modified_base 1: mod_base = OTHER; note = 2'-O-methyluridine with a 3'-phosphorothioate linkage and a 5'-phosphate substitution
  modified_base 2: mod_base = OTHER; note = 2'-fluorouridine with a 3'-phosphorothioate linkage
  modified_base 3: mod_base = gm
  modified_base 4: mod_base = um
  modified_base 5: mod_base = OTHER; note = 2'-fluorouridine
  modified_base 6: mod_base = um
  modified_base 7: mod_base = OTHER; note = 2'-fluoroguanosine
  modified_base 8: mod_base = cm
  modified_base 9: mod_base = um
  modified_base 10: mod_base = gm
  modified_base 11: mod_base = cm
  modified_base 12: mod_base = OTHER; note = 2'-O-methyladenosine
  modified_base 13: mod_base = um
  modified_base 14: mod_base = OTHER; note = 2'-fluoroguanosine
  modified_base 15: mod_base = gm
  modified_base 16: mod_base = OTHER; note = 2'-fluoroguanosine
  modified_base 17: mod_base = cm
  modified_base 18: mod_base = gm
  modified_base 19: mod_base = um
  modified_base 20: mod_base = um
  modified_base 21: mod_base = OTHER; note = 2'-O-methylguanosine with a 3'-phosphorothioate linkage
  modified_base 22: mod_base = OTHER; note = 2'-O-methyluridine with a 3'-phosphorothioate linkage
  modified_base 23: mod_base = OTHER; note = 2'-O-methyladenosine
ttgtttgctgcatgggcgttgta

SEQ ID NO: 1788 - RNA, 21 nt, synthetic construct
  source 1..21: mol_type = other RNA
  modified_base 1: mod_base = OTHER; note = 2'-O-methyladenosine with a 3'-phosphorothioate linkage
  modified_base 2: mod_base = OTHER; note = 2'-O-methyladenosine with a 3'-phosphorothioate linkage
  modified_base 3: mod_base = cm
  modified_base 4: mod_base = gm
  modified_base 5: mod_base = cm
  modified_base 6: mod_base = cm
  modified_base 7: mod_base = cm
  modified_base 8: mod_base = OTHER; note = 2'-O-methyladenosine
  modified_base 9: mod_base = OTHER; note = 2'-fluorouridine
  modified_base 10: mod_base = OTHER; note = 2'-fluoroguanosine
  modified_base 11: mod_base = OTHER; note = 2'-fluorocytidine
  modified_base 12: mod_base = OTHER; note = 2'-O-methyladenosine
  modified_base 13: mod_base = gm
  modified_base 14: mod_base = cm
  modified_base 15: mod_base = OTHER; note = 2'-O-methyladenosine
  modified_base 16: mod_base = OTHER; note = 2'-O-methyladenosine
  modified_base 17: mod_base = OTHER; note = 2'-O-methyladenosine
  modified_base 18: mod_base = cm
  modified_base 19: mod_base = OTHER; note = 2'-O-methyladenosine with a 3'-phosphorothioate linkage
  modified_base 20: mod_base = OTHER; note = 2'-O-methyluridine with a 3'-phosphorothioate linkage
  modified_base 21: mod_base = OTHER; note = 2'-O-methyladenosine
aacgcccatgcagcaaacata

SEQ ID NO: 1789 - RNA, 23 nt, synthetic construct
  source 1..23: mol_type = other RNA
  modified_base 1: mod_base = OTHER; note = 2'-O-methyluridine with a 3'-phosphorothioate linkage and a 5'-phosphate substitution
  modified_base 2: mod_base = OTHER; note = 2'-fluoroadenosine with a 3'-phosphorothioate linkage
  modified_base 3: mod_base = um
  modified_base 4: mod_base = gm
  modified_base 5: mod_base = OTHER; note = 2'-fluorouridine
  modified_base 6: mod_base = um
  modified_base 7: mod_base = OTHER; note = 2'-fluorouridine
  modified_base 8: mod_base = gm
  modified_base 9: mod_base = cm
  modified_base 10: mod_base = um
  modified_base 11: mod_base = gm
  modified_base 12: mod_base = cm
  modified_base 13: mod_base = OTHER; note = 2'-O-methyladenosine
  modified_base 14: mod_base = OTHER; note = 2'-fluorouridine
  modified_base 15: mod_base = gm
  modified_base 16: mod_base = OTHER; note = 2'-fluoroguanosine
  modified_base 17: mod_base = gm
  modified_base 18: mod_base = cm
  modified_base 19: mod_base = gm
  modified_base 20: mod_base = um
  modified_base 21: mod_base = OTHER; note = 2'-O-methyluridine with a 3'-phosphorothioate linkage
  modified_base 22: mod_base = OTHER; note = 2'-O-methylguanosine with a 3'-phosphorothioate linkage
  modified_base 23: mod_base = um
tatgtttgctgcatgggcgttgt

SEQ ID NO: 1790 - RNA, 21 nt, synthetic construct
  source 1..21: mol_type = other RNA
  modified_base 1: mod_base = OTHER; note = 2'-O-methylcytidine with a 3'-phosphorothioate linkage
  modified_base 2: mod_base = OTHER; note = 2'-O-methylcytidine with a 3'-phosphorothioate linkage
  modified_base 3: mod_base = cm
  modified_base 4: mod_base = OTHER; note = 2'-O-methyladenosine
  modified_base 5: mod_base = um
  modified_base 6: mod_base = gm
  modified_base 7: mod_base = cm
  modified_base 8: mod_base = OTHER; note = 2'-O-methyladenosine
  modified_base 9: mod_base = OTHER; note = 2'-fluoroguanosine
  modified_base 10: mod_base = OTHER; note = 2'-fluorocytidine
  modified_base 11: mod_base = OTHER; note = 2'-fluoroadenosine
  modified_base 12: mod_base = OTHER; note = 2'-O-methyladenosine
  modified_base 13: mod_base = OTHER; note = 2'-O-methyladenosine
  modified_base 14: mod_base = cm
  modified_base 15: mod_base = OTHER; note = 2'-O-methyladenosine
  modified_base 16: mod_base = um
  modified_base 17: mod_base = um
  modified_base 18: mod_base = gm
  modified_base 19: mod_base = OTHER; note = 2'-O-methyluridine with a 3'-phosphorothioate linkage
  modified_base 20: mod_base = OTHER; note = 2'-O-methylcytidine with a 3'-phosphorothioate linkage
  modified_base 21: mod_base = OTHER; note = 2'-O-methyladenosine
cccatgcagcaaacattgtca

SEQ ID NO: 1791 - RNA, 23 nt, synthetic construct
  source 1..23: mol_type = other RNA
  modified_base 1: mod_base = OTHER; note = 2'-O-methyluridine with a 3'-phosphorothioate linkage and a 5'-phosphate substitution
  modified_base 2: mod_base = OTHER; note = 2'-fluoroguanosine with a 3'-phosphorothioate linkage
  modified_base 3: mod_base = OTHER; note = 2'-O-methyladenosine
  modified_base 4: mod_base = cm
  modified_base 5: mod_base = OTHER; note = 2'-fluoroadenosine
  modified_base 6: mod_base = OTHER; note = 2'-O-methyladenosine
  modified_base 7: mod_base = OTHER; note = 2'-fluorouridine
  modified_base 8: mod_base = gm
  modified_base 9: mod_base = um
  modified_base 10: mod_base = um
  modified_base 11: mod_base = um
  modified_base 12: mod_base = gm
  modified_base 13: mod_base = cm
  modified_base 14: mod_base = OTHER; note = 2'-fluorouridine
  modified_base 15: mod_base = gm
  modified_base 16: mod_base = OTHER; note = 2'-fluorocytidine
  modified_base 17: mod_base = OTHER; note = 2'-O-methyladenosine
  modified_base 18: mod_base = um
  modified_base 19: mod_base = gm
  modified_base 20: mod_base = gm
  modified_base 21: mod_base = OTHER; note = 2'-O-methylguanosine with a 3'-phosphorothioate linkage
  modified_base 22: mod_base = OTHER; note = 2'-O-methylcytidine with a 3'-phosphorothioate linkage
  modified_base 23: mod_base = gm
tgacaatgtttgctgcatgggcg

SEQ ID NO: 1792 - RNA, 21 nt, synthetic construct
  source 1..21: mol_type = other RNA
  modified_base 1: mod_base = OTHER; note = 2'-O-methylcytidine with a 3'-phosphorothioate linkage
  modified_base 2: mod_base = OTHER; note = 2'-O-methyluridine with a 3'-phosphorothioate linkage
  modified_base 3: mod_base = gm
  modified_base 4: mod_base = um
  modified_base 5: mod_base = gm
  modified_base 6: mod_base = gm
  modified_base 7: mod_base = OTHER; note = 2'-O-methyladenosine
  modified_base 8: mod_base = cm
  modified_base 9: mod_base = OTHER; note = 2'-fluoroadenosine
  modified_base 10: mod_base = OTHER; note = 2'-fluoroguanosine
  modified_base 11: mod_base = OTHER; note = 2'-fluoroguanosine
  modified_base 12: mod_base = OTHER; note = 2'-O-methyladenosine
  modified_base 13: mod_base = um
  modified_base 14: mod_base = gm
  modified_base 15: mod_base = cm
  modified_base 16: mod_base = OTHER; note = 2'-O-methyladenosine
  modified_base 17: mod_base = gm
  modified_base 18: mod_base = cm
  modified_base 19: mod_base = OTHER; note = 2'-O-methyladenosine with a 3'-phosphorothioate linkage
  modified_base 20: mod_base = OTHER; note = 2'-O-methylcytidine with a 3'-phosphorothioate linkage
  modified_base 21: mod_base = OTHER; note = 2'-O-methyladenosine
ctgtggacaggatgcagcaca

SEQ ID NO: 1793 - RNA, 23 nt, synthetic construct
  source 1..23: mol_type = other RNA
  modified_base 1: mod_base = OTHER; note = 2'-O-methyluridine with a 3'-phosphorothioate linkage and a 5'-phosphate substitution
  modified_base 2: mod_base = OTHER; note = 2'-fluoroguanosine with a 3'-phosphorothioate linkage
  modified_base 3: mod_base = um
  modified_base 4: mod_base = gm
  modified_base 5: mod_base = OTHER; note = 2'-fluorocytidine
  modified_base 6: mod_base = um
  modified_base 7: mod_base = OTHER; note = 2'-fluoroguanosine
  modified_base 8: mod_base = cm
  modified_base 9: mod_base = OTHER; note = 2'-O-methyladenosine
  modified_base 10: mod_base = um
  modified_base 11: mod_base = cm
  modified_base 12: mod_base = cm
  modified_base 13: mod_base = um
  modified_base 14: mod_base = OTHER; note = 2'-fluoroguanosine
  modified_base 15: mod_base = um
  modified_base 16: mod_base = OTHER; note = 2'-fluorocytidine
  modified_base 17: mod_base = cm
  modified_base 18: mod_base = OTHER; note = 2'-O-methyladenosine
  modified_base 19: mod_base = cm
  modified_base 20: mod_base = OTHER; note = 2'-O-methyladenosine
  modified_base 21: mod_base = OTHER; note = 2'-O-methylguanosine with a 3'-phosphorothioate linkage
  modified_base 22: mod_base = OTHER; note = 2'-O-methylguanosine with a 3'-phosphorothioate linkage
  modified_base 23: mod_base = cm
tgtgctgcatcctgtccacaggc

SEQ ID NO: 1794 - RNA, 21 nt, synthetic construct
  source 1..21: mol_type = other RNA
  modified_base 1: mod_base = OTHER; note = 2'-O-methylguanosine with a 3'-phosphorothioate linkage
  modified_base 2: mod_base = OTHER; note = 2'-O-methylguanosine with a 3'-phosphorothioate linkage
  modified_base 3: mod_base = OTHER; note = 2'-O-methyladenosine
  modified_base 4: mod_base = um
  modified_base 5: mod_base = gm
  modified_base 6: mod_base = cm
  modified_base 7: mod_base = OTHER; note = 2'-O-methyladenosine
  modified_base 8: mod_base = gm
  modified_base 9: mod_base = OTHER; note = 2'-fluorocytidine
  modified_base 10: mod_base = OTHER; note = 2'-fluoroadenosine
  modified_base 11: mod_base = OTHER; note = 2'-fluorocytidine
  modified_base 12: mod_base = OTHER; note = 2'-O-methyladenosine
  modified_base 13: mod_base = gm
  modified_base 14: mod_base = OTHER; note = 2'-O-methyladenosine
  modified_base 15: mod_base = OTHER; note = 2'-O-methyladenosine
  modified_base 16: mod_base = um
  modified_base 17: mod_base = gm
  modified_base 18: mod_base = um
  modified_base 19: mod_base = OTHER; note = 2'-O-methyluridine with a 3'-phosphorothioate linkage
  modified_base 20: mod_base = OTHER; note = 2'-O-methylguanosine with a 3'-phosphorothioate linkage
  modified_base 21: mod_base = OTHER; note = 2'-O-methyladenosine
ggatgcagcacagaatgttga

SEQ ID NO: 1795 - RNA, 23 nt, synthetic construct
  source 1..23: mol_type = other RNA
  modified_base 1: mod_base = OTHER; note = 2'-O-methyluridine with a 3'-phosphorothioate linkage and a 5'-phosphate substitution
  modified_base 2: mod_base = OTHER; note = 2'-fluorocytidine with a 3'-phosphorothioate linkage
  modified_base 3: mod_base = OTHER; note = 2'-O-methyladenosine
  modified_base 4: mod_base = OTHER; note = 2'-O-methyladenosine
  modified_base 5: mod_base = OTHER; note = 2'-fluorocytidine
  modified_base 6: mod_base = OTHER; note = 2'-O-methyladenosine
  modified_base 7: mod_base = OTHER; note = 2'-fluorouridine
  modified_base 8: mod_base = um
  modified_base 9: mod_base = cm
  modified_base 10: mod_base = um
  modified_base 11: mod_base = gm
  modified_base 12: mod_base = um
  modified_base 13: mod_base = gm
  modified_base 14: mod_base = OTHER; note = 2'-fluorocytidine
  modified_base 15: mod_base = um
  modified_base 16: mod_base = OTHER; note = 2'-fluoroguanosine
  modified_base 17: mod_base = cm
  modified_base 18: mod_base = OTHER; note = 2'-O-methyladenosine
  modified_base 19: mod_base = um
  modified_base 20: mod_base = cm
  modified_base 21: mod_base = OTHER; note = 2'-O-methylcytidine with a 3'-phosphorothioate linkage
  modified_base 22: mod_base = OTHER; note = 2'-O-methyluridine with a 3'-phosphorothioate linkage
  modified_base 23: mod_base = gm
tcaacattctgtgctgcatcctg

SEQ ID NO: 1796 - RNA, 21 nt, synthetic construct
  source 1..21: mol_type = other RNA
  modified_base 1: mod_base = OTHER; note = 2'-O-methyluridine with a 3'-phosphorothioate linkage
  modified_base 2: mod_base = OTHER; note = 2'-O-methyluridine with a 3'-phosphorothioate linkage
  modified_base 3: mod_base = gm
  modified_base 4: mod_base = gm
  modified_base 5: mod_base = um
  modified_base 6: mod_base = OTHER; note = 2'-O-methyladenosine
  modified_base 7: mod_base = gm
  modified_base 8: mod_base = um
  modified_base 9: mod_base = OTHER; note = 2'-fluorouridine
  modified_base 10: mod_base = OTHER; note = 2'-fluorocytidine
  modified_base 11: mod_base = OTHER; note = 2'-fluoroadenosine
  modified_base 12: mod_base = OTHER; note = 2'-O-methyladenosine
  modified_base 13: mod_base = OTHER; note = 2'-O-methyladenosine
  modified_base 14: mod_base = cm
  modified_base 15: mod_base = um
  modified_base 16: mod_base = gm
  modified_base 17: mod_base = um
  modified_base 18: mod_base = OTHER; note = 2'-O-methyladenosine
  modified_base 19: mod_base = OTHER; note = 2'-O-methyluridine with a 3'-phosphorothioate linkage
  modified_base 20: mod_base = OTHER; note = 2'-O-methyluridine with a 3'-phosphorothioate linkage
  modified_base 21: mod_base = OTHER; note = 2'-O-methyladenosine
ttggtagttcaaactgtatta

SEQ ID NO: 1797 - RNA, 23 nt, synthetic construct
  source 1..23: mol_type = other RNA
  modified_base 1: mod_base = OTHER; note = 2'-O-methyluridine with a 3'-phosphorothioate linkage and a 5'-phosphate substitution
  modified_base 2: mod_base = OTHER; note = 2'-fluoroadenosine with a 3'-phosphorothioate linkage
  modified_base 3: mod_base = OTHER; note = 2'-O-methyladenosine
  modified_base 4: mod_base = um
  modified_base 5: mod_base = OTHER; note = 2'-fluoroadenosine
  modified_base 6: mod_base = cm
  modified_base 7: mod_base = OTHER; note = 2'-fluoroadenosine
  modified_base 8: mod_base = gm
  modified_base 9: mod_base = um
  modified_base 10: mod_base = um
  modified_base 11: mod_base = um
  modified_base 12: mod_base = gm
  modified_base 13: mod_base = OTHER; note = 2'-O-methyladenosine
  modified_base 14: mod_base = OTHER; note = 2'-fluoroadenosine
  modified_base 15: mod_base = cm
  modified_base 16: mod_base = OTHER; note = 2'-fluorouridine
  modified_base 17: mod_base = OTHER; note = 2'-O-methyladenosine
  modified_base 18: mod_base = cm
  modified_base 19: mod_base = cm
  modified_base 20: mod_base = OTHER; note = 2'-O-methyladenosine
  modified_base 21: mod_base = OTHER; note = 2'-O-methyladenosine with a 3'-phosphorothioate linkage
  modified_base 22: mod_base = OTHER; note = 2'-O-methylcytidine with a 3'-phosphorothioate linkage
  modified_base 23: mod_base = OTHER; note = 2'-O-methyladenosine
taatacagtttgaactaccaaca

SEQ ID NO: 1798 - RNA, 21 nt, synthetic construct
  source 1..21: mol_type = other RNA
  modified_base 1: mod_base = OTHER; note = 2'-O-methyluridine with a 3'-phosphorothioate linkage
  modified_base 2: mod_base = OTHER; note = 2'-O-methylguanosine with a 3'-phosphorothioate linkage
  modified_base 3: mod_base = gm
  modified_base 4: mod_base = um
  modified_base 5: mod_base = OTHER; note = 2'-O-methyladenosine
  modified_base 6: mod_base = gm
  modified_base 7: mod_base = um
  modified_base 8: mod_base = um
  modified_base 9: mod_base = OTHER; note = 2'-fluorocytidine
  modified_base 10: mod_base = OTHER; note = 2'-fluoroadenosine
  modified_base 11: mod_base = OTHER; note = 2'-fluoroadenosine
  modified_base 12: mod_base = OTHER; note = 2'-O-methyladenosine
  modified_base 13: mod_base = cm
  modified_base 14: mod_base = um
  modified_base 15: mod_base = gm
  modified_base 16: mod_base = um
  modified_base 17: mod_base = OTHER; note = 2'-O-methyladenosine
  modified_base 18: mod_base = um
  modified_base 19: mod_base = OTHER; note = 2'-O-methyluridine with a 3'-phosphorothioate linkage
  modified_base 20: mod_base = OTHER; note = 2'-O-methyladenosine with a 3'-phosphorothioate linkage
  modified_base 21: mod_base = OTHER; note = 2'-O-methyladenosine
tggtagttcaaactgtattaa

SEQ ID NO: 1799 - RNA, 23 nt, synthetic construct
  source 1..23: mol_type = other RNA
  modified_base 1: mod_base = OTHER; note = 2'-O-methyluridine with a 3'-phosphorothioate linkage and a 5'-phosphate substitution
  modified_base 2: mod_base = OTHER; note = 2'-fluorouridine with a 3'-phosphorothioate linkage
  modified_base 3: mod_base = OTHER; note = 2'-O-methyladenosine
  modified_base 4: mod_base = OTHER; note = 2'-O-methyladenosine
  modified_base 5: mod_base = OTHER; note = 2'-fluorouridine
  modified_base 6: mod_base = OTHER; note = 2'-O-methyladenosine
  modified_base 7: mod_base = OTHER; note = 2'-fluorocytidine
  modified_base 8: mod_base = OTHER; note = 2'-O-methyladenosine
  modified_base 9: mod_base = gm
  modified_base 10: mod_base = um
  modified_base 11: mod_base = um
  modified_base 12: mod_base = um
  modified_base 13: mod_base = gm
  modified_base 14: mod_base = OTHER; note = 2'-fluoroadenosine
  modified_base 15: mod_base = OTHER; note = 2'-O-methyladenosine
  modified_base 16: mod_base = OTHER; note = 2'-fluorocytidine
  modified_base 17: mod_base = um
  modified_base 18: mod_base = OTHER; note = 2'-O-methyladenosine
  modified_base 19: mod_base = cm
  modified_base 20: mod_base = cm
  modified_base 21: mod_base = OTHER; note = 2'-O-methyladenosine with a 3'-phosphorothioate linkage
  modified_base 22: mod_base = OTHER; note = 2'-O-methyladenosine with a 3'-phosphorothioate linkage
  modified_base 23: mod_base = cm
ttaatacagtttgaactaccaac

SEQ ID NO: 1800 - RNA, 21 nt, synthetic construct
  source 1..21: mol_type = other RNA
  modified_base 1: mod_base = OTHER; note = 2'-O-methylguanosine with a 3'-phosphorothioate linkage
  modified_base 2: mod_base = OTHER; note = 2'-O-methylguanosine with a 3'-phosphorothioate linkage
  modified_base 3: mod_base = um
  modified_base 4: mod_base = OTHER; note = 2'-O-methyladenosine
  modified_base 5: mod_base = gm
  modified_base 6: mod_base = um
  modified_base 7: mod_base = um
  modified_base 8: mod_base = cm
  modified_base 9: mod_base = OTHER; note = 2'-fluoroadenosine
  modified_base 10: mod_base = OTHER; note = 2'-fluoroadenosine
  modified_base 11: mod_base = OTHER; note = 2'-fluoroadenosine
  modified_base 12: mod_base = cm
  modified_base 13: mod_base = um
  modified_base 14: mod_base = gm
  modified_base 15: mod_base = um
  modified_base 16: mod_base = OTHER; note = 2'-O-methyladenosine
  modified_base 17: mod_base = um
  modified_base 18: mod_base = um
  modified_base 19: mod_base = OTHER; note = 2'-O-methyladenosine with a 3'-phosphorothioate linkage
  modified_base 20: mod_base = OTHER; note = 2'-O-methylcytidine with a 3'-phosphorothioate linkage
  modified_base 21: mod_base = OTHER; note = 2'-O-methyladenosine
ggtagttcaaactgtattaca

SEQ ID NO: 1801 - RNA, 23 nt, synthetic construct
  source 1..23: mol_type = other RNA
  modified_base 1: mod_base = OTHER; note = 2'-O-methyluridine with a 3'-phosphorothioate linkage and a 5'-phosphate substitution
  modified_base 2: mod_base = OTHER; note = 2'-fluoroguanosine with a 3'-phosphorothioate linkage
  modified_base 3: mod_base = um
  modified_base 4: mod_base = OTHER; note = 2'-O-methyladenosine
  modified_base 5: mod_base = OTHER; note = 2'-fluoroadenosine
  modified_base 6: mod_base = um
  modified_base 7: mod_base = OTHER; note = 2'-fluoroadenosine
  modified_base 8: mod_base = cm
  modified_base 9: mod_base = OTHER; note = 2'-O-methyladenosine
  modified_base 10: mod_base = gm
  modified_base 11: mod_base = um
  modified_base 12: mod_base = um
  modified_base 13: mod_base = um
  modified_base 14: mod_base = OTHER; note = 2'-fluoroguanosine
  modified_base 15: mod_base = OTHER; note = 2'-O-methyladenosine
  modified_base 16: mod_base = OTHER; note = 2'-fluoroadenosine
  modified_base 17: mod_base = cm
  modified_base 18: mod_base = um
  modified_base 19: mod_base = OTHER; note = 2'-O-methyladenosine
  modified_base 20: mod_base = cm
  modified_base 21: mod_base = OTHER; note = 2'-O-methylcytidine with a 3'-phosphorothioate linkage
  modified_base 22: mod_base = OTHER; note = 2'-O-methyladenosine with a 3'-phosphorothioate linkage
  modified_base 23: mod_base = OTHER; note = 2'-O-methyladenosine
tgtaatacagtttgaactaccaa

SEQ ID NO: 1802 - RNA, 21 nt, synthetic construct
  source 1..21: mol_type = other RNA
  modified_base 1: mod_base = OTHER; note = 2'-O-methylguanosine with a 3'-phosphorothioate linkage
  modified_base 2: mod_base = OTHER; note = 2'-O-methyluridine with a 3'-phosphorothioate linkage
  modified_base 3: mod_base = OTHER; note = 2'-O-methyladenosine
  modified_base 4: mod_base = um
  modified_base 5: mod_base = um
  modified_base 6: mod_base = OTHER; note = 2'-O-methyladenosine
  modified_base 7: mod_base = cm
  modified_base 8: mod_base = um
  modified_base 9: mod_base = OTHER; note = 2'-fluorouridine
  modified_base 10: mod_base = OTHER; note = 2'-fluorouridine
  modified_base 11: mod_base = OTHER; note = 2'-fluoroadenosine
  modified_base 12: mod_base = OTHER; note = 2'-O-methyladenosine
  modified_base 13: mod_base = um
  modified_base 14: mod_base = gm
  modified_base 15: mod_base = gm
  modified_base 16: mod_base = OTHER; note = 2'-O-methyladenosine
  modified_base 17: mod_base = OTHER; note = 2'-O-methyladenosine
  modified_base 18: mod_base = gm
  modified_base 19: mod_base = OTHER; note = 2'-O-methylcytidine with a 3'-phosphorothioate linkage
  modified_base 20: mod_base = OTHER; note = 2'-O-methyladenosine with a 3'-phosphorothioate linkage
  modified_base 21: mod_base = OTHER; note = 2'-O-methyladenosine
gtattactttaatggaagcaa

SEQ ID NO: 1803 - RNA, 23 nt, synthetic construct
  source 1..23: mol_type = other RNA
  modified_base 1: mod_base = OTHER; note = 2'-O-methyluridine with a 3'-phosphorothioate linkage and a 5'-phosphate substitution
  modified_base 2: mod_base = OTHER; note = 2'-fluorouridine with a 3'-phosphorothioate linkage
  modified_base 3: mod_base = gm
  modified_base 4: mod_base = cm
  modified_base 5: mod_base = OTHER; note = 2'-fluorouridine
  modified_base 6: mod_base = um
  modified_base 7: mod_base = OTHER; note = 2'-fluorocytidine
  modified_base 8: mod_base = cm
  modified_base 9: mod_base = OTHER; note = 2'-O-methyladenosine
  modified_base 10: mod_base = um
  modified_base 11: mod_base = um
  modified_base 12: mod_base = OTHER; note = 2'-O-methyladenosine
  modified_base 13: mod_base = OTHER; note = 2'-O-methyladenosine
  modified_base 14: mod_base = OTHER; note = 2'-fluoroadenosine
  modified_base 15: mod_base = gm
  modified_base 16: mod_base = OTHER; note = 2'-fluorouridine
  modified_base 17: mod_base = OTHER; note = 2'-O-methyladenosine
  modified_base 18: mod_base = OTHER; note = 2'-O-methyladenosine
  modified_base 19: mod_base = um
  modified_base 20: mod_base = OTHER; note = 2'-O-methyladenosine
  modified_base 21: mod_base = OTHER; note = 2'-O-methylcytidine with a 3'-phosphorothioate linkage
  modified_base 22: mod_base = OTHER; note = 2'-O-methyladenosine with a 3'-phosphorothioate linkage
  modified_base 23: mod_base = gm
ttgcttccattaaagtaatacag

SEQ ID NO: 1804 - RNA, 21 nt, synthetic construct
  source 1..21: mol_type = other RNA
  modified_base 1: mod_base = OTHER; note = 2'-O-methyluridine with a 3'-phosphorothioate linkage
  modified_base 2: mod_base = OTHER; note = 2'-O-methyladenosine with a 3'-phosphorothioate linkage
  modified_base 3: mod_base = um
  modified_base 4: mod_base = um
  modified_base 5: mod_base = OTHER; note = 2'-O-methyladenosine
  modified_base 6: mod_base = cm
  modified_base 7: mod_base = um
  modified_base 8: mod_base = um
  modified_base 9: mod_base = OTHER; note = 2'-fluorouridine
  modified_base 10: mod_base = OTHER; note = 2'-fluoroadenosine
  modified_base 11: mod_base = OTHER; note = 2'-fluoroadenosine
  modified_base 12: mod_base = um
  modified_base 13: mod_base = gm
  modified_base 14: mod_base = gm
  modified_base 15: mod_base = OTHER; note = 2'-O-methyladenosine
  modified_base 16: mod_base = OTHER; note = 2'-O-methyladenosine
  modified_base 17: mod_base = gm
  modified_base 18: mod_base = cm
  modified_base 19: mod_base = OTHER; note = 2'-O-methyladenosine with a 3'-phosphorothioate linkage
  modified_base 20: mod_base = OTHER; note = 2'-O-methyladenosine with a 3'-phosphorothioate linkage
  modified_base 21: mod_base = OTHER; note = 2'-O-methyladenosine
tattactttaatggaagcaaa

SEQ ID NO: 1805 - RNA, 23 nt, synthetic construct
  source 1..23: mol_type = other RNA
  modified_base 1: mod_base = OTHER; note = 2'-O-methyluridine with a 3'-phosphorothioate linkage and a 5'-phosphate substitution
  modified_base 2: mod_base = OTHER; note = 2'-fluorouridine with a 3'-phosphorothioate linkage
  modified_base 3: mod_base = um
  modified_base 4: mod_base = gm
  modified_base 5: mod_base = OTHER; note = 2'-fluorocytidine
  modified_base 6: mod_base = um
  modified_base 7: mod_base = OTHER; note = 2'-fluorouridine
  modified_base 8: mod_base = cm
  modified_base 9: mod_base = cm
  modified_base 10: mod_base = OTHER; note = 2'-O-methyladenosine
  modified_base 11: mod_base = um
  modified_base 12: mod_base = um
  modified_base 13: mod_base = OTHER; note = 2'-O-methyladenosine
  modified_base 14: mod_base = OTHER; note = 2'-fluoroadenosine
  modified_base 15: mod_base = OTHER; note = 2'-O-methyladenosine
  modified_base 16: mod_base = OTHER; note = 2'-fluoroguanosine
  modified_base 17: mod_base = um
  modified_base 18: mod_base = OTHER; note = 2'-O-methyladenosine
  modified_base 19: mod_base = OTHER; note = 2'-O-methyladenosine
  modified_base 20: mod_base = um
  modified_base 21: mod_base = OTHER; note = 2'-O-methyladenosine with a 3'-phosphorothioate linkage
  modified_base 22: mod_base = OTHER; note = 2'-O-methylcytidine with a 3'-phosphorothioate linkage
  modified_base 23: mod_base = OTHER; note = 2'-O-methyladenosine
tttgcttccattaaagtaataca

SEQ ID NO: 1806 - RNA, 21 nt, synthetic construct
  source 1..21: mol_type = other RNA
  modified_base 1: mod_base = OTHER; note = 2'-O-methyluridine with a 3'-phosphorothioate linkage
  modified_base 2: mod_base = OTHER; note = 2'-O-methyluridine with a 3'-phosphorothioate linkage
  modified_base 3: mod_base = OTHER; note = 2'-O-methyladenosine
  modified_base 4: mod_base = cm
  modified_base 5: mod_base = um
  modified_base 6: mod_base = um
  modified_base 7: mod_base = um
  modified_base 8: mod_base = OTHER; note = 2'-O-methyladenosine
  modified_base 9: mod_base = OTHER; note = 2'-fluoroadenosine
  modified_base 10: mod_base = OTHER; note = 2'-fluorouridine
  modified_base 11: mod_base = OTHER; note = 2'-fluoroguanosine
  modified_base 12: mod_base = gm
  modified_base 13: mod_base = OTHER; note = 2'-O-methyladenosine
  modified_base 14: mod_base = OTHER; note = 2'-O-methyladenosine
  modified_base 15: mod_base = gm
  modified_base 16: mod_base = cm
  modified_base 17: mod_base = OTHER; note = 2'-O-methyladenosine
  modified_base 18: mod_base = OTHER; note = 2'-O-methyladenosine
  modified_base 19: mod_base = OTHER; note = 2'-O-methylguanosine with a 3'-phosphorothioate linkage
  modified_base 20: mod_base = OTHER; note = 2'-O-methyluridine with a 3'-phosphorothioate linkage
  modified_base 21: mod_base = OTHER; note = 2'-O-methyladenosine
ttactttaatggaagcaagta

SEQ ID NO: 1807 - RNA, 23 nt, synthetic construct
  source 1..23: mol_type = other RNA
  modified_base 1: mod_base = OTHER; note = 2'-O-methyluridine with a 3'-phosphorothioate linkage and a 5'-phosphate substitution
  modified_base 2: mod_base = OTHER; note = 2'-fluoroadenosine with a 3'-phosphorothioate linkage
  modified_base 3: mod_base = cm
  modified_base 4: mod_base = um
  modified_base 5: mod_base = OTHER; note = 2'-fluorouridine
  modified_base 6: mod_base = gm
  modified_base 7: mod_base = OTHER; note = 2'-fluorocytidine
  modified_base 8: mod_base = um
  modified_base 9: mod_base = um
  modified_base 10: mod_base = cm
  modified_base 11: mod_base = cm
  modified_base 12: mod_base = OTHER; note = 2'-O-methyladenosine
  modified_base 13: mod_base = um
  modified_base 14: mod_base = OTHER; note = 2'-fluorouridine
  modified_base 15: mod_base = OTHER; note = 2'-O-methyladenosine
  modified_base 16: mod_base = OTHER; note = 2'-fluoroadenosine
  modified_base 17: mod_base = OTHER; note = 2'-O-methyladenosine
  modified_base 18: mod_base = gm
  modified_base 19: mod_base = um
  modified_base 20: mod_base = OTHER; note = 2'-O-methyladenosine
  modified_base 21: mod_base = OTHER; note = 2'-O-methyladenosine with a 3'-phosphorothioate linkage
  modified_base 22: mod_base = OTHER; note = 2'-O-methyluridine with a 3'-phosphorothioate linkage
  modified_base 23: mod_base = OTHER; note = 2'-O-methyladenosine
tacttgcttccattaaagtaata

SEQ ID NO: 1808 - RNA, 21 nt, synthetic construct
  source 1..21: mol_type = other RNA
  modified_base 1: mod_base = OTHER; note = 2'-O-methyluridine with a 3'-phosphorothioate linkage
  modified_base 2: mod_base = OTHER; note = 2'-O-methyladenosine with a 3'-phosphorothioate linkage
  modified_base 3: mod_base = cm
  modified_base 4: mod_base = um
  modified_base 5: mod_base = um
  modified_base 6: mod_base = um
  modified_base 7: mod_base = OTHER; note = 2'-O-methyladenosine
  modified_base 8: mod_base = OTHER; note = 2'-O-methyladenosine
  modified_base 9: mod_base = OTHER; note = 2'-fluorouridine
  modified_base 10: mod_base = OTHER; note = 2'-fluoroguanosine
  modified_base 11: mod_base = OTHER; note = 2'-fluoroguanosine
  modified_base 12: mod_base = OTHER; note = 2'-O-methyladenosine
  modified_base 13: mod_base = OTHER; note = 2'-O-methyladenosine
  modified_base 14: mod_base = gm
  modified_base 15: mod_base = cm
  modified_base 16: mod_base = OTHER; note = 2'-O-methyladenosine
  modified_base 17: mod_base = OTHER; note = 2'-O-methyladenosine
  modified_base 18: mod_base = gm
  modified_base 19: mod_base = OTHER; note = 2'-O-methyluridine with a 3'-phosphorothioate linkage
  modified_base 20: mod_base = OTHER; note = 2'-O-methylguanosine with a 3'-phosphorothioate linkage
  modified_base 21: mod_base = OTHER; note = 2'-O-methyladenosine
tactttaatggaagcaagtga

SEQ ID NO: 1809 - RNA, 23 nt, synthetic construct
  source 1..23: mol_type = other RNA
  modified_base 1: mod_base = OTHER; note = 2'-O-methyluridine with a 3'-phosphorothioate linkage and a 5'-phosphate substitution
  modified_base 2: mod_base = OTHER; note = 2'-fluorocytidine with a 3'-phosphorothioate linkage
  modified_base 3: mod_base = OTHER; note = 2'-O-methyladenosine
  modified_base 4: mod_base = cm
  modified_base 5: mod_base = OTHER; note = 2'-fluorouridine
  modified_base 6: mod_base = um
  modified_base 7: mod_base = OTHER; note = 2'-fluoroguanosine
  modified_base 8: mod_base = cm
  modified_base 9: mod_base = um
  modified_base 10: mod_base = um
  modified_base 11: mod_base = cm
  modified_base 12: mod_base = cm
  modified_base 13: mod_base = OTHER; note = 2'-O-methyladenosine
  modified_base 14: mod_base = OTHER; note = 2'-fluorouridine
  modified_base 15: mod_base = um
  modified_base 16: mod_base = OTHER; note = 2'-fluoroadenosine
  modified_base 17: mod_base = OTHER; note = 2'-O-methyladenosine
  modified_base 18: mod_base = OTHER; note = 2'-O-methyladenosine
  modified_base 19: mod_base = gm
  modified_base 20: mod_base = um
  modified_base 21: mod_base = OTHER; note = 2'-O-methyladenosine with a 3'-phosphorothioate linkage
  modified_base 22: mod_base = OTHER; note = 2'-O-methyladenosine with a 3'-phosphorothioate linkage
  modified_base 23: mod_base = um
tcacttgcttccattaaagtaat

SEQ ID NO: 1810 - RNA, 21 nt, synthetic construct
  source 1..21: mol_type = other RNA
  modified_base 1: mod_base = OTHER; note = 2'-O-methylguanosine with a 3'-phosphorothioate linkage
  modified_base 2: mod_base = OTHER; note = 2'-O-methyluridine with a 3'-phosphorothioate linkage
  modified_base 3: mod_base = cm
  modified_base 4: mod_base = cm
  modified_base 5: mod_base = cm
  modified_base 6: mod_base = OTHER; note = 2'-O-methyladenosine
  modified_base 7: mod_base = cm
  modified_base 8: mod_base = OTHER; note = 2'-O-methyladenosine
  modified_base 9: mod_base = OTHER; note = 2'-fluoroadenosine
  modified_base 10: mod_base = OTHER; note = 2'-fluoroadenosine
  modified_base 11: mod_base = OTHER; note = 2'-fluorouridine
  modified_base 12: mod_base = gm
  modified_base 13: mod_base = OTHER; note = 2'-O-methyladenosine
  modified_base 14: mod_base = OTHER; note = 2'-O-methyladenosine
  modified_base 15: mod_base = gm
  modified_base 16: mod_base = OTHER; note = 2'-O-methyladenosine
  modified_base 17: mod_base = um
  modified_base 18: mod_base = um
  modified_base 19: mod_base = OTHER; note = 2'-O-methyluridine with a 3'-phosphorothioate linkage
  modified_base 20: mod_base = OTHER; note = 2'-O-methyladenosine with a 3'-phosphorothioate linkage
  modified_base 21: mod_base = OTHER; note = 2'-O-methyladenosine
gtcccacaaatgaagatttaa

SEQ ID NO: 1811 - RNA, 23 nt, synthetic construct
  source 1..23: mol_type = other RNA
  modified_base 1: mod_base = OTHER; note = 2'-O-methyluridine with a 3'-phosphorothioate linkage and a 5'-phosphate substitution
  modified_base 2: mod_base = OTHER; note = 2'-fluorouridine with a 3'-phosphorothioate linkage
  modified_base 3: mod_base = OTHER; note = 2'-O-methyladenosine
  modified_base 4: mod_base = OTHER; note = 2'-O-methyladenosine
  modified_base 5: mod_base = OTHER; note = 2'-fluoroadenosine
  modified_base 6: mod_base = um
  modified_base 7: mod_base = OTHER; note = 2'-fluorocytidine
  modified_base 8: mod_base = um
  modified_base 9: mod_base = um
  modified_base 10: mod_base = cm
  modified_base 11: mod_base = OTHER; note = 2'-O-methyladenosine
  modified_base 12: mod_base = um
  modified_base 13: mod_base = um
  modified_base 14: mod_base = OTHER; note = 2'-fluorouridine
  modified_base 15: mod_base = gm
  modified_base 16: mod_base = OTHER; note = 2'-fluorouridine
  modified_base 17: mod_base = gm
  modified_base 18: mod_base = gm
  modified_base 19: mod_base = gm
  modified_base 20: mod_base = OTHER; note = 2'-O-methyladenosine
  modified_base 21: mod_base = OTHER; note = 2'-O-methylcytidine with a 3'-phosphorothioate linkage
  modified_base 22: mod_base = OTHER; note = 2'-O-methylcytidine with a 3'-phosphorothioate linkage
  modified_base 23: mod_base = OTHER; note = 2'-O-methyladenosine
ttaaatcttcatttgtgggacca

SEQ ID NO: 1812 - RNA, 21 nt, synthetic construct
  source 1..21: mol_type = other RNA
  modified_base 1: mod_base = OTHER; note = 2'-O-methyladenosine with a 3'-phosphorothioate linkage
  modified_base 2: mod_base = OTHER; note = 2'-O-methyladenosine with a 3'-phosphorothioate linkage
  modified_base 3: mod_base = gm
  modified_base 4: mod_base = OTHER; note = 2'-O-methyladenosine
  modified_base 5: mod_base = um
  modified_base 6: mod_base = um
  modified_base 7: mod_base = um
  modified_base 8: mod_base = OTHER; note = 2'-O-methyladenosine
  modified_base 9: mod_base = OTHER; note = 2'-fluorouridine
  modified_base 10: mod_base = OTHER; note = 2'-fluoroadenosine
  modified_base 11: mod_base = OTHER; note = 2'-fluorouridine
  modified_base 12: mod_base = OTHER; note = 2'-O-methyladenosine
  modified_base 13: mod_base = um
  modified_base 14: mod_base = cm
  modified_base 15: mod_base = OTHER; note = 2'-O-methyladenosine
  modified_base 16: mod_base = gm
  modified_base 17: mod_base = cm
  modified_base 18: mod_base = um
  modified_base 19: mod_base = OTHER; note = 2'-O-methylguanosine with a 3'-phosphorothioate linkage
  modified_base 20: mod_base = OTHER; note = 2'-O-methylcytidine with a 3'-phosphorothioate linkage
  modified_base 21: mod_base = OTHER; note = 2'-O-methyladenosine
aagatttatatatcagctgca

SEQ ID NO: 1813 - RNA, 23 nt, synthetic construct
  source 1..23: mol_type = other RNA
  modified_base 1: mod_base = OTHER; note = 2'-O-methyluridine with a 3'-phosphorothioate linkage and a 5'-phosphate substitution
  modified_base 2: mod_base = OTHER; note = 2'-fluoroguanosine with a 3'-phosphorothioate linkage
  modified_base 3: mod_base = cm
  modified_base 4: mod_base = OTHER; note = 2'-O-methyladenosine
  modified_base 5: mod_base = OTHER; note = 2'-fluoroguanosine
  modified_base 6: mod_base = cm
  modified_base 7: mod_base = OTHER; note = 2'-fluorouridine
  modified_base 8: mod_base = gm
  modified_base 9: mod_base = OTHER; note = 2'-O-methyladenosine
  modified_base 10: mod_base = um
  modified_base 11: mod_base = OTHER; note = 2'-O-methyladenosine
  modified_base 12: mod_base = um
  modified_base 13: mod_base = OTHER; note = 2'-O-methyladenosine
  modified_base 14: mod_base = OTHER; note = 2'-fluorouridine
  modified_base 15: mod_base = OTHER; note = 2'-O-methyladenosine
  modified_base 16: mod_base = OTHER; note = 2'-fluoroadenosine
  modified_base 17: mod_base = OTHER; note = 2'-O-methyladenosine
  modified_base 18: mod_base = um
  modified_base 19: mod_base = cm
  modified_base 20: mod_base = um
  modified_base 21: mod_base = OTHER; note = 2'-O-methyluridine with a 3'-phosphorothioate linkage
  modified_base 22: mod_base = OTHER; note = 2'-O-methylcytidine with a 3'-phosphorothioate linkage
  modified_base 23: mod_base = OTHER; note = 2'-O-methyladenosine
tgcagctgatatataaatcttca

SEQ ID NO: 1814 - RNA, 21 nt, synthetic construct
  source 1..21: mol_type = other RNA
  modified_base 1: mod_base = OTHER; note = 2'-O-methyluridine with a 3'-phosphorothioate linkage
  modified_base 2: mod_base = OTHER; note = 2'-O-methylcytidine with a 3'-phosphorothioate linkage
  modified_base 3: mod_base = OTHER; note = 2'-O-methyladenosine
  modified_base 4: mod_base = gm
  modified_base 5: mod_base = cm
  modified_base 6: mod_base = um
  modified_base 7: mod_base = gm
  modified_base 8: mod_base = cm
  modified_base 9: mod_base = OTHER; note = 2'-fluoroadenosine
  modified_base 10: mod_base = OTHER; note = 2'-fluorocytidine
  modified_base 11: mod_base = OTHER; note = 2'-fluorocytidine
  modified_base 12: mod_base = OTHER; note = 2'-O-methyladenosine
  modified_base 13: mod_base = um
  modified_base 14: mod_base = gm
  modified_base 15: mod_base = cm
  modified_base 16: mod_base = cm
  modified_base 17: mod_base = OTHER; note = 2'-O-methyladenosine
  modified_base 18: mod_base = um
  modified_base 19: mod_base = OTHER; note = 2'-O-methylcytidine with a 3'-phosphorothioate linkage
  modified_base 20: mod_base = OTHER; note = 2'-O-methyluridine with a 3'-phosphorothioate linkage
  modified_base 21: mod_base = OTHER; note = 2'-O-methyladenosine
tcagctgcaccatgccatcta

SEQ ID NO: 1815 - RNA, 23 nt, synthetic construct
  source 1..23: mol_type = other RNA
  modified_base 1: mod_base = OTHER; note = 2'-O-methyluridine with a 3'-phosphorothioate linkage and a 5'-phosphate substitution
  modified_base 2: mod_base = OTHER; note = 2'-fluoroadenosine with a 3'-phosphorothioate linkage
  modified_base 3: mod_base = gm
  modified_base 4: mod_base = OTHER; note = 2'-O-methyladenosine
  modified_base 5: mod_base = OTHER; note = 2'-fluorouridine
  modified_base 6: mod_base = gm
  modified_base 7: mod_base = OTHER; note = 2'-fluoroguanosine
  modified_base 8: mod_base = cm
  modified_base 9: mod_base = OTHER; note = 2'-O-methyladenosine
  modified_base 10: mod_base = um
  modified_base 11: mod_base = gm
  modified_base 12: mod_base = gm
  modified_base 13: mod_base = um
  modified_base 14: mod_base = OTHER; note = 2'-fluoroguanosine
  modified_base 15: mod_base = cm
  modified_base 16: mod_base = OTHER; note = 2'-fluoroadenosine
  modified_base 17: mod_base = gm
  modified_base 18: mod_base = cm
  modified_base 19: mod_base = um
  modified_base 20: mod_base = gm
  modified_base 21: mod_base = OTHER; note = 2'-O-methyladenosine with a 3'-phosphorothioate linkage
  modified_base 22: mod_base = OTHER; note = 2'-O-methyluridine with a 3'-phosphorothioate linkage
  modified_base 23: mod_base = OTHER; note = 2'-O-methyladenosine
tagatggcatggtgcagctgata

SEQ ID NO: 1816 - RNA, 21 nt, synthetic construct
  source 1..21: mol_type = other RNA
  modified_base 1: mod_base = OTHER; note = 2'-O-methylcytidine with a 3'-phosphorothioate linkage
  modified_base 2: mod_base = OTHER; note = 2'-O-methyladenosine with a 3'-phosphorothioate linkage
  modified_base 3: mod_base = gm
  modified_base 4: mod_base = cm
  modified_base 5: mod_base = um
  modified_base 6: mod_base = gm
  modified_base 7: mod_base = cm
  modified_base 8: mod_base = OTHER; note = 2'-O-methyladenosine
  modified_base 9: mod_base = OTHER; note = 2'-fluorocytidine
  modified_base 10: mod_base = OTHER; note = 2'-fluorocytidine
  modified_base 11: mod_base = OTHER; note = 2'-fluoroadenosine
  modified_base 12: mod_base = um
  modified_base 13: mod_base = gm
  modified_base 14: mod_base = cm
  modified_base 15: mod_base = cm
  modified_base 16: mod_base = OTHER; note = 2'-O-methyladenosine
  modified_base 17: mod_base = um
  modified_base 18: mod_base = cm
  modified_base 19: mod_base = OTHER; note = 2'-O-methyluridine with a 3'-phosphorothioate linkage
  modified_base 20: mod_base = OTHER; note = 2'-O-methyladenosine with a 3'-phosphorothioate linkage
  modified_base 21: mod_base = OTHER; note = 2'-O-methyladenosine
cagctgcaccatgccatctaa

SEQ ID NO: 1817 - RNA, 23 nt, synthetic construct
  source 1..23: mol_type = other RNA
  modified_base 1: mod_base = OTHER; note = 2'-O-methyluridine with a 3'-phosphorothioate linkage and a 5'-phosphate substitution
  modified_base 2: mod_base = OTHER; note = 2'-fluorouridine with a 3'-phosphorothioate linkage
  modified_base 3: mod_base = OTHER; note = 2'-O-methyladenosine
  modified_base 4: mod_base = gm
  modified_base 5: mod_base = OTHER; note = 2'-fluoroadenosine
  modified_base 6: mod_base = um
  modified_base 7: mod_base = OTHER; note = 2'-fluoroguanosine
  modified_base 8: mod_base = gm
  modified_base 9: mod_base = cm
  modified_base 10: mod_base = OTHER; note = 2'-O-methyladenosine
  modified_base 11: mod_base = um
  modified_base 12: mod_base = gm
  modified_base 13: mod_base = gm
  modified_base 14: mod_base = OTHER; note = 2'-fluorouridine
  modified_base 15: mod_base = gm
  modified_base 16: mod_base = OTHER; note = 2'-fluorocytidine
  modified_base 17: mod_base = OTHER; note = 2'-O-methyladenosine
  modified_base 18: mod_base = gm
  modified_base 19: mod_base = cm
  modified_base 20: mod_base = um
  modified_base 21: mod_base = OTHER; note = 2'-O-methylguanosine with a 3'-phosphorothioate linkage
  modified_base 22: mod_base = OTHER; note = 2'-O-methyladenosine with a 3'-phosphorothioate linkage
  modified_base 23: mod_base = um
ttagatggcatggtgcagctgat

SEQ ID NO: 1818 - RNA, 21 nt, synthetic construct
  source 1..21: mol_type = other RNA
  modified_base 1: mod_base = OTHER; note = 2'-O-methyladenosine with a 3'-phosphorothioate linkage
  modified_base 2: mod_base = OTHER; note = 2'-O-methylguanosine with a 3'-phosphorothioate linkage
  modified_base 3: mod_base = cm
  modified_base 4: mod_base = um
  modified_base 5: mod_base = gm
  modified_base 6: mod_base = cm
  modified_base 7: mod_base = OTHER; note = 2'-O-methyladenosine
  modified_base 8: mod_base = cm
  modified_base 9: mod_base = OTHER; note = 2'-fluorocytidine
  modified_base 10: mod_base = OTHER; note = 2'-fluoroadenosine
  modified_base 11: mod_base = OTHER; note = 2'-fluorouridine
  modified_base 12: mod_base = gm
  modified_base 13: mod_base = cm
  modified_base 14: mod_base = cm
  modified_base 15: mod_base = OTHER; note = 2'-O-methyladenosine
  modified_base 16: mod_base = um
  modified_base 17: mod_base = cm
  modified_base 18: mod_base = um
  modified_base 19: mod_base = OTHER; note = 2'-O-methyladenosine with a 3'-phosphorothioate linkage
  modified_base 20: mod_base = OTHER; note = 2'-O-methyluridine with a 3'-phosphorothioate linkage
  modified_base 21: mod_base = OTHER; note = 2'-O-methyladenosine
agctgcaccatgccatctata

SEQ ID NO: 1819 - RNA, 23 nt, synthetic construct
  source 1..23: mol_type = other RNA
  modified_base 1: mod_base = OTHER; note = 2'-O-methyluridine with a 3'-phosphorothioate linkage and a 5'-phosphate substitution
  modified_base 2: mod_base = OTHER; note = 2'-fluoroadenosine with a 3'-phosphorothioate linkage
  modified_base 3: mod_base = um
  modified_base 4: mod_base = OTHER; note = 2'-O-methyladenosine
  modified_base 5: mod_base = OTHER; note = 2'-fluoroguanosine
  modified_base 6: mod_base = OTHER; note = 2'-O-methyladenosine
  modified_base 7: mod_base = OTHER; note = 2'-fluorouridine
  modified_base 8: mod_base = gm
  modified_base 9: mod_base = gm
  modified_base 10: mod_base = cm
  modified_base 11: mod_base = OTHER; note = 2'-O-methyladenosine
  modified_base 12: mod_base = um
  modified_base 13: mod_base = gm
  modified_base 14: mod_base = OTHER; note = 2'-fluoroguanosine
  modified_base 15: mod_base = um
  modified_base 16: mod_base = OTHER; note = 2'-fluoroguanosine
  modified_base 17: mod_base = cm
  modified_base 18: mod_base = OTHER; note = 2'-O-methyladenosine
  modified_base 19: mod_base = gm
  modified_base 20: mod_base = cm
  modified_base 21: mod_base = OTHER; note = 2'-O-methyluridine with a 3'-phosphorothioate linkage
  modified_base 22: mod_base = OTHER; note = 2'-O-methylguanosine with a 3'-phosphorothioate linkage
  modified_base 23: mod_base = OTHER; note = 2'-O-methyladenosine
tatagatggcatggtgcagctga

SEQ ID NO: 1820 - RNA, 21 nt, synthetic construct
  source 1..21: mol_type = other RNA
  modified_base 1: mod_base = OTHER; note = 2'-O-methylguanosine with a 3'-phosphorothioate linkage
  modified_base 2: mod_base = OTHER; note = 2'-O-methylcytidine with a 3'-phosphorothioate linkage
  modified_base 3: mod_base = um
  modified_base 4: mod_base = gm
  modified_base 5: mod_base = cm
  modified_base 6: mod_base = OTHER; note = 2'-O-methyladenosine
  modified_base 7: mod_base = cm
  modified_base 8: mod_base = cm
  modified_base 9: mod_base = OTHER; note = 2'-fluoroadenosine
  modified_base 10: mod_base = OTHER; note = 2'-fluorouridine
  modified_base 11: mod_base = OTHER; note = 2'-fluoroguanosine
  modified_base 12: mod_base = cm
  modified_base 13: mod_base = cm
  modified_base 14: mod_base = OTHER; note = 2'-O-methyladenosine
  modified_base 15: mod_base = um
  modified_base 16: mod_base = cm
  modified_base 17: mod_base = um
  modified_base 18: mod_base = OTHER; note = 2'-O-methyladenosine
  modified_base 19: mod_base = OTHER; note = 2'-O-methyluridine with a 3'-phosphorothioate linkage
  modified_base 20: mod_base = OTHER; note = 2'-O-methyladenosine with a 3'-phosphorothioate linkage
  modified_base 21: mod_base = OTHER; note = 2'-O-methyladenosine
gctgcaccatgccatctataa

SEQ ID NO: 1821 - RNA, 23 nt, synthetic construct
  source 1..23: mol_type = other RNA
  modified_base 1: mod_base = OTHER; note = 2'-O-methyluridine with a 3'-phosphorothioate linkage and a 5'-phosphate substitution
  modified_base 2: mod_base = OTHER; note = 2'-fluorouridine with a 3'-phosphorothioate linkage
  modified_base 3: mod_base = OTHER; note = 2'-O-methyladenosine
  modified_base 4: mod_base = um
  modified_base 5: mod_base = OTHER; note = 2'-fluoroadenosine
  modified_base 6: mod_base = gm
  modified_base 7: mod_base = OTHER; note = 2'-fluoroadenosine
  modified_base 8: mod_base = um
  modified_base 9: mod_base = gm
  modified_base 10: mod_base = gm
  modified_base 11: mod_base = cm
  modified_base 12: mod_base = OTHER; note = 2'-O-methyladenosine
  modified_base 13: mod_base = um
  modified_base 14: mod_base = OTHER; note = 2'-fluoroguanosine
  modified_base 15: mod_base = gm
  modified_base 16: mod_base = OTHER; note = 2'-fluorouridine
  modified_base 17: mod_base = gm
  modified_base 18: mod_base = cm
  modified_base 19: mod_base = OTHER; note = 2'-O-methyladenosine
  modified_base 20: mod_base = gm
  modified_base 21: mod_base = OTHER; note = 2'-O-methylcytidine with a 3'-phosphorothioate linkage
  modified_base 22: mod_base = OTHER; note = 2'-O-methyluridine with a 3'-phosphorothioate linkage
  modified_base 23: mod_base = gm
ttatagatggcatggtgcagctg

SEQ ID NO: 1822 - RNA, 21 nt, synthetic construct
  source 1..21: mol_type = other RNA
  modified_base 1: mod_base = OTHER; note = 2'-O-methylcytidine with a 3'-phosphorothioate linkage
  modified_base 2: mod_base = OTHER; note = 2'-O-methyluridine with a 3'-phosphorothioate linkage
  modified_base 3: mod_base = gm
  modified_base 4: mod_base = cm
  modified_base 5: mod_base = OTHER; note = 2'-O-methyladenosine
  modified_base 6: mod_base = cm
  modified_base 7: mod_base = cm
  modified_base 8: mod_base = OTHER; note = 2'-O-methyladenosine
  modified_base 9: mod_base = OTHER; note = 2'-fluorouridine
  modified_base 10: mod_base = OTHER; note = 2'-fluoroguanosine
  modified_base 11: mod_base = OTHER; note = 2'-fluorocytidine
  modified_base 12: mod_base = cm
  modified_base 13: mod_base = OTHER; note = 2'-O-methyladenosine
  modified_base 14: mod_base = um
  modified_base 15: mod_base = cm
  modified_base 16: mod_base = um
  modified_base 17: mod_base = OTHER; note = 2'-O-methyladenosine
  modified_base 18: mod_base = um
  modified_base 19: mod_base = OTHER; note = 2'-O-methyladenosine with a 3'-phosphorothioate linkage
  modified_base 20: mod_base = OTHER; note = 2'-O-methylguanosine with a 3'-phosphorothioate linkage
  modified_base 21: mod_base = OTHER; note = 2'-O-methyladenosine
ctgcaccatgccatctataga

SEQ ID NO: 1823 - RNA, 23 nt, synthetic construct
  source 1..23: mol_type = other RNA
  modified_base 1: mod_base = OTHER; note = 2'-O-methyluridine with a 3'-phosphorothioate linkage and a 5'-phosphate substitution
  modified_base 2: mod_base = OTHER; note = 2'-fluorocytidine with a 3'-phosphorothioate linkage
  modified_base 3: mod_base = um
  modified_base 4: mod_base = OTHER; note = 2'-O-methyladenosine
  modified_base 5: mod_base = OTHER; note = 2'-fluorouridine
  modified_base 6: mod_base = OTHER; note = 2'-O-methyladenosine
  modified_base 7: mod_base = OTHER; note = 2'-fluoroguanosine
  modified_base 8: mod_base = OTHER; note = 2'-O-methyladenosine
  modified_base 9: mod_base = um
  modified_base 10: mod_base = gm
  modified_base 11: mod_base = gm
  modified_base 12: mod_base = cm
  modified_base 13: mod_base = OTHER; note = 2'-O-methyladenosine
  modified_base 14: mod_base = OTHER; note = 2'-fluorouridine
  modified_base 15: mod_base = gm
  modified_base 16: mod_base = OTHER; note = 2'-fluoroguanosine
  modified_base 17: mod_base = um
  modified_base 18: mod_base = gm
  modified_base 19: mod_base = cm
  modified_base 20: mod_base = OTHER; note = 2'-O-methyladenosine
  modified_base 21: mod_base = OTHER; note = 2'-O-methylguanosine with a 3'-phosphorothioate linkage
  modified_base 22: mod_base = OTHER; note = 2'-O-methylcytidine with a 3'-phosphorothioate linkage
  modified_base 23: mod_base = um
tctatagatggcatggtgcagct

SEQ ID NO: 1824 - RNA, 21 nt, synthetic construct
  source 1..21: mol_type = other RNA
  modified_base 1: mod_base = OTHER; note = 2'-O-methyluridine with a 3'-phosphorothioate linkage
  modified_base 2: mod_base = OTHER; note = 2'-O-methylguanosine with a 3'-phosphorothioate linkage
  modified_base 3: mod_base = cm
  modified_base 4: mod_base = OTHER; note = 2'-O-methyladenosine
  modified_base 5: mod_base = cm
  modified_base 6: mod_base = cm
  modified_base 7: mod_base = OTHER; note = 2'-O-methyladenosine
  modified_base 8: mod_base = um
  modified_base 9: mod_base = OTHER; note = 2'-fluoroguanosine
  modified_base 10: mod_base = OTHER; note = 2'-fluorocytidine
  modified_base 11: mod_base = OTHER; note = 2'-fluorocytidine
  modified_base 12: mod_base = OTHER; note = 2'-O-methyladenosine
  modified_base 13: mod_base = um
  modified_base 14: mod_base = cm
  modified_base 15: mod_base = um
  modified_base 16: mod_base = OTHER; note = 2'-O-methyladenosine
  modified_base 17: mod_base = um
  modified_base 18: mod_base = OTHER; note = 2'-O-methyladenosine
  modified_base 19: mod_base = OTHER; note = 2'-O-methylguanosine with a 3'-phosphorothioate linkage
  modified_base 20: mod_base = OTHER; note = 2'-O-methyladenosine with a 3'-phosphorothioate linkage
  modified_base 21: mod_base = OTHER; note = 2'-O-methyladenosine
tgcaccatgccatctatagaa

SEQ ID NO: 1825 - RNA, 23 nt, synthetic construct
  source 1..23: mol_type = other RNA
  modified_base 1: mod_base = OTHER; note = 2'-O-methyluridine with a 3'-phosphorothioate linkage and a 5'-phosphate substitution
  modified_base 2: mod_base = OTHER; note = 2'-fluorouridine with a 3'-phosphorothioate linkage
  modified_base 3: mod_base = cm
  modified_base 4: mod_base = um
  modified_base 5: mod_base = OTHER; note = 2'-fluoroadenosine
  modified_base 6: mod_base = um
  modified_base 7: mod_base = OTHER; note = 2'-fluoroadenosine
  modified_base 8: mod_base = gm
  modified_base 9: mod_base = OTHER; note = 2'-O-methyladenosine
  modified_base 10: mod_base = um
  modified_base 11: mod_base = gm
  modified_base 12: mod_base = gm
  modified_base 13: mod_base = cm
  modified_base 14: mod_base = OTHER; note = 2'-fluoroadenosine
  modified_base 15: mod_base = um
  modified_base 16: mod_base = OTHER; note = 2'-fluoroguanosine
  modified_base 17: mod_base = gm
  modified_base 18: mod_base = um
  modified_base 19: mod_base = gm
  modified_base 20: mod_base = cm
  modified_base 21: mod_base = OTHER; note = 2'-O-methyladenosine with a 3'-phosphorothioate linkage
  modified_base 22: mod_base = OTHER; note = 2'-O-methylguanosine with a 3'-phosphorothioate linkage
  modified_base 23: mod_base = cm
ttctatagatggcatggtgcagc

SEQ ID NO: 1826 - RNA, 21 nt, synthetic construct
  source 1..21: mol_type = other RNA
  modified_base 1: mod_base = OTHER; note = 2'-O-methylguanosine with a 3'-phosphorothioate linkage
  modified_base 2: mod_base = OTHER; note = 2'-O-methylcytidine with a 3'-phosphorothioate linkage
  modified_base 3: mod_base = OTHER; note = 2'-O-methyladenosine
  modified_base 4: mod_base = cm
  modified_base 5: mod_base = cm
  modified_base 6: mod_base = OTHER; note = 2'-O-methyladenosine
  modified_base 7: mod_base = um
  modified_base 8: mod_base = gm
  modified_base 9: mod_base = OTHER; note = 2'-fluorocytidine
  modified_base 10: mod_base = OTHER; note = 2'-fluorocytidine
  modified_base 11: mod_base = OTHER; note = 2'-fluoroadenosine
  modified_base 12: mod_base = um
  modified_base 13: mod_base = cm
  modified_base 14: mod_base = um
  modified_base 15: mod_base = OTHER; note = 2'-O-methyladenosine
  modified_base 16: mod_base = um
  modified_base 17: mod_base = OTHER; note = 2'-O-methyladenosine
  modified_base 18: mod_base = gm
  modified_base 19: mod_base = OTHER; note = 2'-O-methyladenosine with a 3'-phosphorothioate linkage
  modified_base 20: mod_base = OTHER; note = 2'-O-methylguanosine with a 3'-phosphorothioate linkage
  modified_base 21: mod_base = OTHER; note = 2'-O-methyladenosine
gcaccatgccatctatagaga

SEQ ID NO: 1827 - RNA, 23 nt, synthetic construct
  source 1..23: mol_type = other RNA
  modified_base 1: mod_base = OTHER; note = 2'-O-methyluridine with a 3'-phosphorothioate linkage and a 5'-phosphate substitution
  modified_base 2: mod_base = OTHER; note = 2'-fluorocytidine with a 3'-phosphorothioate linkage
  modified_base 3: mod_base = um
  modified_base 4: mod_base = cm
  modified_base 5: mod_base = OTHER; note = 2'-fluorouridine
  modified_base 6: mod_base = OTHER; note = 2'-O-methyladenosine
  modified_base 7: mod_base = OTHER; note = 2'-fluorouridine
  modified_base 8: mod_base = OTHER; note = 2'-O-methyladenosine
  modified_base 9: mod_base = gm
  modified_base 10: mod_base = OTHER; note = 2'-O-methyladenosine
  modified_base 11: mod_base = um
  modified_base 12: mod_base = gm
  modified_base 13: mod_base = gm
  modified_base 14: mod_base = OTHER; note = 2'-fluorocytidine
  modified_base 15: mod_base = OTHER; note = 2'-O-methyladenosine
  modified_base 16: mod_base = OTHER; note = 2'-fluorouridine
  modified_base 17: mod_base = gm
  modified_base 18: mod_base = gm
  modified_base 19: mod_base = um
  modified_base 20: mod_base = gm
  modified_base 21: mod_base = OTHER; note = 2'-O-methylcytidine with a 3'-phosphorothioate linkage
  modified_base 22: mod_base = OTHER; note = 2'-O-methyladenosine with a 3'-phosphorothioate linkage
  modified_base 23: mod_base = gm
tctctatagatggcatggtgcag

SEQ ID NO: 1828 - RNA, 21 nt, synthetic construct
  source 1..21: mol_type = other RNA
  modified_base 1: mod_base = OTHER; note = 2'-O-methylcytidine with a 3'-phosphorothioate linkage
  modified_base 2: mod_base = OTHER; note = 2'-O-methyladenosine with a 3'-phosphorothioate linkage
  modified_base 3: mod_base = cm
  modified_base 4: mod_base = cm
  modified_base 5: mod_base = OTHER; note = 2'-O-methyladenosine
  modified_base 6: mod_base = um
  modified_base 7: mod_base = gm
  modified_base 8: mod_base = cm
  modified_base 9: mod_base = OTHER; note = 2'-fluorocytidine
  modified_base 10: mod_base = OTHER; note = 2'-fluoroadenosine
  modified_base 11: mod_base = OTHER; note = 2'-fluorouridine
  modified_base 12: mod_base = cm
  modified_base 13: mod_base = um
  modified_base 14: mod_base = OTHER; note = 2'-O-methyladenosine
  modified_base 15: mod_base = um
  modified_base 16: mod_base = OTHER; note = 2'-O-methyladenosine
  modified_base 17: mod_base = gm
  modified_base 18: mod_base = OTHER; note = 2'-O-methyladenosine
  modified_base 19: mod_base = OTHER; note = 2'-O-methylguanosine with a 3'-phosphorothioate linkage
  modified_base 20: mod_base = OTHER; note = 2'-O-methyladenosine with a 3'-phosphorothioate linkage
  modified_base 21: mod_base = OTHER; note = 2'-O-methyladenosine
caccatgccatctatagagaa

SEQ ID NO: 1829 - RNA, 23 nt, synthetic construct
  source 1..23: mol_type = other RNA
  modified_base 1: mod_base = OTHER; note = 2'-O-methyluridine with a 3'-phosphorothioate linkage and a 5'-phosphate substitution
  modified_base 2: mod_base = OTHER; note = 2'-fluorouridine with a 3'-phosphorothioate linkage
  modified_base 3: mod_base = cm
  modified_base 4: mod_base = um
  modified_base 5: mod_base = OTHER; note = 2'-fluorocytidine
  modified_base 6: mod_base = um
  modified_base 7: mod_base = OTHER; note = 2'-fluoroadenosine
  modified_base 8: mod_base = um
  modified_base 9: mod_base = OTHER; note = 2'-O-methyladenosine
  modified_base 10: mod_base = gm
  modified_base 11: mod_base = OTHER; note = 2'-O-methyladenosine
  modified_base 12: mod_base = um
  modified_base 13: mod_base = gm
  modified_base 14: mod_base = OTHER; note = 2'-fluoroguanosine
  modified_base 15: mod_base = cm
  modified_base 16: mod_base = OTHER; note = 2'-fluoroadenosine
  modified_base 17: mod_base = um
  modified_base 18: mod_base = gm
  modified_base 19: mod_base = gm
  modified_base 20: mod_base = um
  modified_base 21: mod_base = OTHER; note = 2'-O-methylguanosine with a 3'-phosphorothioate linkage
  modified_base 22: mod_base = OTHER; note = 2'-O-methylcytidine with a 3'-phosphorothioate linkage
  modified_base 23: mod_base = OTHER; note = 2'-O-methyladenosine
ttctctatagatggcatggtgca

SEQ ID NO: 1830 - RNA, 21 nt, synthetic construct
  source 1..21: mol_type = other RNA
  modified_base 1: mod_base = OTHER; note = 2'-O-methyladenosine with a 3'-phosphorothioate linkage
  modified_base 2: mod_base = OTHER; note = 2'-O-methyluridine with a 3'-phosphorothioate linkage
  modified_base 3: mod_base = gm
  modified_base 4: mod_base = cm
  modified_base 5: mod_base = cm
  modified_base 6: mod_base = OTHER; note = 2'-O-methyladenosine
  modified_base 7: mod_base = um
  modified_base 8: mod_base = cm
  modified_base 9: mod_base = OTHER; note = 2'-fluorouridine
  modified_base 10: mod_base = OTHER; note = 2'-fluoroadenosine
  modified_base 11: mod_base = OTHER; note = 2'-fluorouridine
  modified_base 12: mod_base = OTHER; note = 2'-O-methyladenosine
  modified_base 13: mod_base = gm
  modified_base 14: mod_base = OTHER; note = 2'-O-methyladenosine
  modified_base 15: mod_base = gm
  modified_base 16: mod_base = OTHER; note = 2'-O-methyladenosine
  modified_base 17: mod_base = um
  modified_base 18: mod_base = OTHER; note = 2'-O-methyladenosine
  modified_base 19: mod_base = OTHER; note = 2'-O-methylguanosine with a 3'-phosphorothioate linkage
  modified_base 20: mod_base = OTHER; note = 2'-O-methylguanosine with a 3'-phosphorothioate linkage
  modified_base 21: mod_base = OTHER; note = 2'-O-methyladenosine
atgccatctatagagatagga

SEQ ID NO: 1831 - RNA, 23 nt, synthetic construct
  source 1..23: mol_type = other RNA
  modified_base 1: mod_base = OTHER; note = 2'-O-methyluridine with a 3'-phosphorothioate linkage and a 5'-phosphate substitution
  modified_base 2: mod_base = OTHER; note = 2'-fluorocytidine with a 3'-phosphorothioate linkage
  modified_base 3: mod_base = cm
  modified_base 4: mod_base = um
  modified_base 5: mod_base = OTHER; note = 2'-fluoroadenosine
  modified_base 6: mod_base = um
  modified_base 7: mod_base = OTHER; note = 2'-fluorocytidine
  modified_base 8: mod_base = um
  modified_base 9: mod_base = cm
  modified_base 10: mod_base = um
  modified_base 11: mod_base = OTHER; note = 2'-O-methyladenosine
  modified_base 12: mod_base = um
  modified_base 13: mod_base = OTHER; note = 2'-O-methyladenosine
  modified_base 14: mod_base = OTHER; note = 2'-fluoroguanosine
  modified_base 15: mod_base = OTHER; note = 2'-O-methyladenosine
  modified_base 16: mod_base = OTHER; note = 2'-fluorouridine
  modified_base 17: mod_base = gm
  modified_base 18: mod_base = gm
  modified_base 19: mod_base = cm
  modified_base 20: mod_base = OTHER; note = 2'-O-methyladenosine
  modified_base 21: mod_base = OTHER; note = 2'-O-methyluridine with a 3'-phosphorothioate linkage
  modified_base 22: mod_base = OTHER; note = 2'-O-methylguanosine with a 3'-phosphorothioate linkage
  modified_base 23: mod_base = gm
tcctatctctatagatggcatgg

SEQ ID NO: 1832 - RNA, 21 nt, synthetic construct
  source 1..21: mol_type = other RNA
  modified_base 1: mod_base = OTHER; note = 2'-O-methylcytidine with a 3'-phosphorothioate linkage
  modified_base 2: mod_base = OTHER; note = 2'-O-methyluridine with a 3'-phosphorothioate linkage
  modified_base 3: mod_base = OTHER; note = 2'-O-methyladenosine
  modified_base 4: mod_base = um
  modified_base 5: mod_base = OTHER; note = 2'-O-methyladenosine
  modified_base 6: mod_base = gm
  modified_base 7: mod_base = OTHER; note = 2'-O-methyladenosine
  modified_base 8: mod_base = gm
  modified_base 9: mod_base = OTHER; note = 2'-fluoroadenosine
  modified_base 10: mod_base = OTHER; note = 2'-fluorouridine
  modified_base 11: mod_base = OTHER; note = 2'-fluoroadenosine
  modified_base 12: mod_base = gm
  modified_base 13: mod_base = gm
  modified_base 14: mod_base = OTHER; note = 2'-O-methyladenosine
  modified_base 15: mod_base = OTHER; note = 2'-O-methyladenosine
  modified_base 16: mod_base = cm
  modified_base 17: mod_base = gm
  modified_base 18: mod_base = gm
  modified_base 19: mod_base = OTHER; note = 2'-O-methyluridine with a 3'-phosphorothioate linkage
  modified_base 20: mod_base = OTHER; note = 2'-O-methylguanosine with a 3'-phosphorothioate linkage
  modified_base 21: mod_base = OTHER; note = 2'-O-methyladenosine
ctatagagataggaacggtga

SEQ ID NO: 1833 - RNA, 23 nt, synthetic construct
  source 1..23: mol_type = other RNA
  modified_base 1: mod_base = OTHER; note = 2'-O-methyluridine with a 3'-phosphorothioate linkage and a 5'-phosphate substitution
  modified_base 2: mod_base = OTHER; note = 2'-fluorocytidine with a 3'-phosphorothioate linkage
  modified_base 3: mod_base = OTHER; note = 2'-O-methyladenosine
  modified_base 4: mod_base = cm
  modified_base 5: mod_base = OTHER; note = 2'-fluorocytidine
  modified_base 6: mod_base = gm
  modified_base 7: mod_base = OTHER; note = 2'-fluorouridine
  modified_base 8: mod_base = um
  modified_base 9: mod_base = cm
  modified_base 10: mod_base = cm
  modified_base 11: mod_base = um
  modified_base 12: mod_base = OTHER; note = 2'-O-methyladenosine
  modified_base 13: mod_base = um
  modified_base 14: mod_base = OTHER; note = 2'-fluorocytidine
  modified_base 15: mod_base = um
  modified_base 16: mod_base = OTHER; note = 2'-fluorocytidine
  modified_base 17: mod_base = um
  modified_base 18: mod_base = OTHER; note = 2'-O-methyladenosine
  modified_base 19: mod_base = um
  modified_base 20: mod_base = OTHER; note = 2'-O-methyladenosine
  modified_base 21: mod_base = OTHER; note = 2'-O-methylguanosine with a 3'-phosphorothioate linkage
  modified_base 22: mod_base = OTHER; note = 2'-O-methyladenosine with a 3'-phosphorothioate linkage
  modified_base 23: mod_base = um
tcaccgttcctatctctatagat

SEQ ID NO: 1834 - RNA, 21 nt, synthetic construct
  source 1..21: mol_type = other RNA
  modified_base 1: mod_base = OTHER; note = 2'-O-methyluridine with a 3'-phosphorothioate linkage
  modified_base 2: mod_base = OTHER; note = 2'-O-methyladenosine with a 3'-phosphorothioate linkage
  modified_base 3: mod_base = um
  modified_base 4: mod_base = OTHER; note = 2'-O-methyladenosine
  modified_base 5: mod_base = gm
  modified_base 6: mod_base = OTHER; note = 2'-O-methyladenosine
  modified_base 7: mod_base = gm
  modified_base 8: mod_base = OTHER; note = 2'-O-methyladenosine
  modified_base 9: mod_base = OTHER; note = 2'-fluorouridine
  modified_base 10: mod_base = OTHER; note = 2'-fluoroadenosine
  modified_base 11: mod_base = OTHER; note = 2'-fluoroguanosine
  modified_base 12: mod_base = gm
  modified_base 13: mod_base = OTHER; note = 2'-O-methyladenosine
  modified_base 14: mod_base = OTHER; note = 2'-O-methyladenosine
  modified_base 15: mod_base = cm
  modified_base 16: mod_base = gm
  modified_base 17: mod_base = gm
  modified_base 18: mod_base = um
  modified_base 19: mod_base = OTHER; note = 2'-O-methylguanosine with a 3'-phosphorothioate linkage
  modified_base 20: mod_base = OTHER; note = 2'-O-methylguanosine with a 3'-phosphorothioate linkage
  modified_base 21: mod_base = OTHER; note = 2'-O-methyladenosine
tatagagataggaacggtgga

SEQ ID NO: 1835 - RNA, 23 nt, synthetic construct
  source 1..23: mol_type = other RNA
  modified_base 1: mod_base = OTHER; note = 2'-O-methyluridine with a 3'-phosphorothioate linkage and a 5'-phosphate substitution
  modified_base 2: mod_base = OTHER; note = 2'-fluorocytidine with a 3'-phosphorothioate linkage
  modified_base 3: mod_base = cm
  modified_base 4: mod_base = OTHER; note = 2'-O-methyladenosine
  modified_base 5: mod_base = OTHER; note = 2'-fluorocytidine
  modified_base 6: mod_base = cm
  modified_base 7: mod_base = OTHER; note = 2'-fluoroguanosine
  modified_base 8: mod_base = um
  modified_base 9: mod_base = um
  modified_base 10: mod_base = cm
  modified_base 11: mod_base = cm
  modified_base 12: mod_base = um
  modified_base 13: mod_base = OTHER; note = 2'-O-methyladenosine
  modified_base 14: mod_base = OTHER; note = 2'-fluorouridine
  modified_base 15: mod_base = cm
  modified_base 16: mod_base = OTHER; note = 2'-fluorouridine
  modified_base 17: mod_base = cm
  modified_base 18: mod_base = um
  modified_base 19: mod_base = OTHER; note = 2'-O-methyladenosine
  modified_base 20: mod_base = um
  modified_base 21: mod_base = OTHER; note = 2'-O-methyladenosine with a 3'-phosphorothioate linkage
  modified_base 22: mod_base = OTHER; note = 2'-O-methylguanosine with a 3'-phosphorothioate linkage
  modified_base 23: mod_base = OTHER; note = 2'-O-methyladenosine
tccaccgttcctatctctataga

SEQ ID NO: 1836 - RNA, 21 nt, synthetic construct
  source 1..21: mol_type = other RNA
  modified_base 1: mod_base = OTHER; note = 2'-O-methyladenosine with a 3'-phosphorothioate linkage
  modified_base 2: mod_base = OTHER; note = 2'-O-methyluridine with a 3'-phosphorothioate linkage
  modified_base 3: mod_base = OTHER; note = 2'-O-methyladenosine
  modified_base 4: mod_base = gm
  modified_base 5: mod_base = OTHER; note = 2'-O-methyladenosine
  modified_base 6: mod_base = gm
  modified_base 7: mod_base = OTHER; note = 2'-O-methyladenosine
  modified_base 8: mod_base = um
  modified_base 9: mod_base = OTHER; note = 2'-fluoroadenosine
  modified_base 10: mod_base = OTHER; note = 2'-fluoroguanosine
  modified_base 11: mod_base = OTHER; note = 2'-fluoroguanosine
  modified_base 12: mod_base = OTHER; note = 2'-O-methyladenosine
  modified_base 13: mod_base = OTHER; note = 2'-O-methyladenosine
  modified_base 14: mod_base = cm
  modified_base 15: mod_base = gm
  modified_base 16: mod_base = gm
  modified_base 17: mod_base = um
  modified_base 18: mod_base = gm
  modified_base 19: mod_base = OTHER; note = 2'-O-methylguanosine with a 3'-phosphorothioate linkage
  modified_base 20: mod_base = OTHER; note = 2'-O-methylguanosine with a 3'-phosphorothioate linkage
  modified_base 21: mod_base = OTHER; note = 2'-O-methyladenosine
atagagataggaacggtggga

SEQ ID NO: 1837 - RNA, 23 nt, synthetic construct
  source 1..23: mol_type = other RNA
  modified_base 1: mod_base = OTHER; note = 2'-O-methyluridine with a 3'-phosphorothioate linkage and a 5'-phosphate substitution
  modified_base 2: mod_base = OTHER; note = 2'-fluorocytidine with a 3'-phosphorothioate linkage
  modified_base 3: mod_base = cm
  modified_base 4: mod_base = cm
  modified_base 5: mod_base = OTHER; note = 2'-fluoroadenosine
  modified_base 6: mod_base = cm
  modified_base 7: mod_base = OTHER; note = 2'-fluorocytidine
  modified_base 8: mod_base = gm
  modified_base 9: mod_base = um
  modified_base 10: mod_base = um
  modified_base 11: mod_base = cm
  modified_base 12: mod_base = cm
  modified_base 13: mod_base = um
  modified_base 14: mod_base = OTHER; note = 2'-fluoroadenosine
  modified_base 15: mod_base = um
  modified_base 16: mod_base = OTHER; note = 2'-fluorocytidine
  modified_base 17: mod_base = um
  modified_base 18: mod_base = cm
  modified_base 19: mod_base = um
  modified_base 20: mod_base = OTHER; note = 2'-O-methyladenosine
  modified_base 21: mod_base = OTHER; note = 2'-O-methyluridine with a 3'-phosphorothioate linkage
  modified_base 22: mod_base = OTHER; note = 2'-O-methyladenosine with a 3'-phosphorothioate linkage
  modified_base 23: mod_base = gm
tcccaccgttcctatctctatag

SEQ ID NO: 1838 - RNA, 21 nt, synthetic construct
  source 1..21: mol_type = other RNA
  modified_base 1: mod_base = OTHER; note = 2'-O-methyluridine with a 3'-phosphorothioate linkage
  modified_base 2: mod_base = OTHER; note = 2'-O-methyladenosine with a 3'-phosphorothioate linkage
  modified_base 3: mod_base = cm
  modified_base 4: mod_base = um
  modified_base 5: mod_base = OTHER; note = 2'-O-methyladenosine
  modified_base 6: mod_base = cm
  modified_base 7: mod_base = cm
  modified_base 8: mod_base = um
  modified_base 9: mod_base = OTHER; note = 2'-fluorocytidine
  modified_base 10: mod_base = OTHER; note = 2'-fluoroadenosine
  modified_base 11: mod_base = OTHER; note = 2'-fluoroguanosine
  modified_base 12: mod_base = cm
  modified_base 13: mod_base = OTHER; note = 2'-O-methyladenosine
  modified_base 14: mod_base = OTHER; note = 2'-O-methyladenosine
  modified_base 15: mod_base = gm
  modified_base 16: mod_base = cm
  modified_base 17: mod_base = cm
  modified_base 18: mod_base = um
  modified_base 19: mod_base = OTHER; note = 2'-O-methylguanosine with a 3'-phosphorothioate linkage
  modified_base 20: mod_base = OTHER; note = 2'-O-methyluridine with a 3'-phosphorothioate linkage
  modified_base 21: mod_base = OTHER; note = 2'-O-methyladenosine
tactacctcagcaagcctgta

SEQ ID NO: 1839 - RNA, 23 nt, synthetic construct
  source 1..23: mol_type = other RNA
  modified_base 1: mod_base = OTHER; note = 2'-O-methyluridine with a 3'-phosphorothioate linkage and a 5'-phosphate substitution
  modified_base 2: mod_base = OTHER; note = 2'-fluoroadenosine with a 3'-phosphorothioate linkage
  modified_base 3: mod_base = cm
  modified_base 4: mod_base = OTHER; note = 2'-O-methyladenosine
  modified_base 5: mod_base = OTHER; note = 2'-fluoroguanosine
  modified_base 6: mod_base = gm
  modified_base 7: mod_base = OTHER; note = 2'-fluorocytidine
  modified_base 8: mod_base = um
  modified_base 9: mod_base = um
  modified_base 10: mod_base = gm
  modified_base 11: mod_base = cm
  modified_base 12: mod_base = um
  modified_base 13: mod_base = gm
  modified_base 14: mod_base = OTHER; note = 2'-fluoroadenosine
  modified_base 15: mod_base = gm
  modified_base 16: mod_base = OTHER; note = 2'-fluoroguanosine
  modified_base 17: mod_base = um
  modified_base 18: mod_base = OTHER; note = 2'-O-methyladenosine
  modified_base 19: mod_base = gm
  modified_base 20: mod_base = um
  modified_base 21: mod_base = OTHER; note = 2'-O-methyladenosine with a 3'-phosphorothioate linkage
  modified_base 22: mod_base = OTHER; note = 2'-O-methylguanosine with a 3'-phosphorothioate linkage
  modified_base 23: mod_base = gm
tacaggcttgctgaggtagtagg

SEQ ID NO: 1840 - RNA, 21 nt, synthetic construct
  source 1..21: mol_type = other RNA
  modified_base 1: mod_base = OTHER; note = 2'-O-methylguanosine with a 3'-phosphorothioate linkage
  modified_base 2: mod_base = OTHER; note = 2'-O-methyluridine with a 3'-phosphorothioate linkage
  modified_base 3: mod_base = um
  modified_base 4: mod_base = um
  modified_base 5: mod_base = gm
  modified_base 6: mod_base = cm
  modified_base 7: mod_base = OTHER; note = 2'-O-methyladenosine
  modified_base 8: mod_base = gm
  modified_base 9: mod_base = OTHER; note = 2'-fluoroadenosine
  modified_base 10: mod_base = OTHER; note = 2'-fluorouridine
  modified_base 11: mod_base = OTHER; note = 2'-fluoroguanosine
  modified_base 12: mod_base = cm
  modified_base 13: mod_base = um
  modified_base 14: mod_base = OTHER; note = 2'-O-methyladenosine
  modified_base 15: mod_base = gm
  modified_base 16: mod_base = gm
  modified_base 17: mod_base = um
  modified_base 18: mod_base = gm
  modified_base 19: mod_base = OTHER; note = 2'-O-methyluridine with a 3'-phosphorothioate linkage
  modified_base 20: mod_base = OTHER; note = 2'-O-methyluridine with a 3'-phosphorothioate linkage
  modified_base 21: mod_base = OTHER; note = 2'-O-methyladenosine
gtttgcagatgctaggtgtta

SEQ ID NO: 1841 - RNA, 23 nt, synthetic construct
  source 1..23: mol_type = other RNA
  modified_base 1: mod_base = OTHER; note = 2'-O-methyluridine with a 3'-phosphorothioate linkage and a 5'-phosphate substitution
  modified_base 2: mod_base = OTHER; note = 2'-fluoroadenosine with a 3'-phosphorothioate linkage
  modified_base 3: mod_base = OTHER; note = 2'-O-methyladenosine
  modified_base 4: mod_base = cm
  modified_base 5: mod_base = OTHER; note = 2'-fluoroadenosine
  modified_base 6: mod_base = cm
  modified_base 7: mod_base = OTHER; note = 2'-fluorocytidine
  modified_base 8: mod_base = um
  modified_base 9: mod_base = OTHER; note = 2'-O-methyladenosine
  modified_base 10: mod_base = gm
  modified_base 11: mod_base = cm
  modified_base 12: mod_base = OTHER; note = 2'-O-methyladenosine
  modified_base 13: mod_base = um
  modified_base 14: mod_base = OTHER; note = 2'-fluorocytidine
  modified_base 15: mod_base = um
  modified_base 16: mod_base = OTHER; note = 2'-fluoroguanosine
  modified_base 17: mod_base = cm
  modified_base 18: mod_base = OTHER; note = 2'-O-methyladenosine
  modified_base 19: mod_base = OTHER; note = 2'-O-methyladenosine
  modified_base 20: mod_base = OTHER; note = 2'-O-methyladenosine
  modified_base 21: mod_base = OTHER; note = 2'-O-methylcytidine with a 3'-phosphorothioate linkage
  modified_base 22: mod_base = OTHER; note = 2'-O-methyladenosine with a 3'-phosphorothioate linkage
  modified_base 23: mod_base = gm
taacacctagcatctgcaaacag

SEQ ID NO: 1842 - RNA, 21 nt, synthetic construct
  source 1..21: mol_type = other RNA
  modified_base 1: mod_base = OTHER; note = 2'-O-methyluridine with a 3'-phosphorothioate linkage
  modified_base 2: mod_base = OTHER; note = 2'-O-methyluridine with a 3'-phosphorothioate linkage
  modified_base 3: mod_base = cm
  modified_base 4: mod_base = OTHER; note = 2'-O-methyladenosine
  modified_base 5: mod_base = OTHER; note = 2'-O-methyladenosine
  modified_base 6: mod_base = gm
  modified_base 7: mod_base = gm
  modified_base 8: mod_base = OTHER; note = 2'-O-methyladenosine
  modified_base 9: mod_base = OTHER; note = 2'-fluoroguanosine
  modified_base 10: mod_base = OTHER; note = 2'-fluorocytidine
  modified_base 11: mod_base = OTHER; note = 2'-fluoroadenosine
  modified_base 12: mod_base = um
  modified_base 13: mod_base = gm
  modified_base 14: mod_base = cm
  modified_base 15: mod_base = OTHER; note = 2'-O-methyladenosine
  modified_base 16: mod_base = OTHER; note = 2'-O-methyladenosine
  modified_base 17: mod_base = OTHER; note = 2'-O-methyladenosine
  modified_base 18: mod_base = gm
  modified_base 19: mod_base = OTHER; note = 2'-O-methyladenosine with a 3'-phosphorothioate linkage
  modified_base 20: mod_base = OTHER; note = 2'-O-methyluridine with a 3'-phosphorothioate linkage
  modified_base 21: mod_base = OTHER; note = 2'-O-methyladenosine
ttcaaggagcatgcaaagata

SEQ ID NO: 1843 - RNA, 23 nt, synthetic construct
  source 1..23: mol_type = other RNA
  modified_base 1: mod_base = OTHER; note = 2'-O-methyluridine with a 3'-phosphorothioate linkage and a 5'-phosphate substitution
  modified_base 2: mod_base = OTHER; note = 2'-fluoroadenosine with a 3'-phosphorothioate linkage
  modified_base 3: mod_base = um
  modified_base 4: mod_base = cm
  modified_base 5: mod_base = OTHER; note = 2'-fluorouridine
  modified_base 6: mod_base = um
  modified_base 7: mod_base = OTHER; note = 2'-fluorouridine
  modified_base 8: mod_base = gm
  modified_base 9: mod_base = cm
  modified_base 10: mod_base = OTHER; note = 2'-O-methyladenosine
  modified_base 11: mod_base = um
  modified_base 12: mod_base = gm
  modified_base 13: mod_base = cm
  modified_base 14: mod_base = OTHER; note = 2'-fluorouridine
  modified_base 15: mod_base = cm
  modified_base 16: mod_base = OTHER; note = 2'-fluorocytidine
  modified_base 17: mod_base = um
  modified_base 18: mod_base = um
  modified_base 19: mod_base = gm
  modified_base 20: mod_base = OTHER; note = 2'-O-methyladenosine
  modified_base 21: mod_base = OTHER; note = 2'-O-methyladenosine with a 3'-phosphorothioate linkage
  modified_base 22: mod_base = OTHER; note = 2'-O-methylcytidine with a 3'-phosphorothioate linkage
  modified_base 23: mod_base = OTHER; note = 2'-O-methyladenosine
tatctttgcatgctccttgaaca

SEQ ID NO: 1844 - RNA, 21 nt, synthetic construct
  source 1..21: mol_type = other RNA
  modified_base 1: mod_base = OTHER; note = 2'-O-methyluridine with a 3'-phosphorothioate linkage
  modified_base 2: mod_base = OTHER; note = 2'-O-methylcytidine with a 3'-phosphorothioate linkage
  modified_base 3: mod_base = OTHER; note = 2'-O-methyladenosine
  modified_base 4: mod_base = OTHER; note = 2'-O-methyladenosine
  modified_base 5: mod_base = gm
  modified_base 6: mod_base = gm
  modified_base 7: mod_base = OTHER; note = 2'-O-methyladenosine
  modified_base 8: mod_base = gm
  modified_base 9: mod_base = OTHER; note = 2'-fluorocytidine
  modified_base 10: mod_base = OTHER; note = 2'-fluoroadenosine
  modified_base 11: mod_base = OTHER; note = 2'-fluorouridine
  modified_base 12: mod_base = gm
  modified_base 13: mod_base = cm
  modified_base 14: mod_base = OTHER; note = 2'-O-methyladenosine
  modified_base 15: mod_base = OTHER; note = 2'-O-methyladenosine
  modified_base 16: mod_base = OTHER; note = 2'-O-methyladenosine
  modified_base 17: mod_base = gm
  modified_base 18: mod_base = OTHER; note = 2'-O-methyladenosine
  modified_base 19: mod_base = OTHER; note = 2'-O-methyluridine with a 3'-phosphorothioate linkage
  modified_base 20: mod_base = OTHER; note = 2'-O-methyladenosine with a 3'-phosphorothioate linkage
  modified_base 21: mod_base = OTHER; note = 2'-O-methyladenosine
tcaaggagcatgcaaagataa

SEQ ID NO: 1845 - RNA, 23 nt, synthetic construct
  source 1..23: mol_type = other RNA
  modified_base 1: mod_base = OTHER; note = 2'-O-methyluridine with a 3'-phosphorothioate linkage and a 5'-phosphate substitution
  modified_base 2: mod_base = OTHER; note = 2'-fluorouridine with a 3'-phosphorothioate linkage
  modified_base 3: mod_base = OTHER; note = 2'-O-methyladenosine
  modified_base 4: mod_base = um
  modified_base 5: mod_base = OTHER; note = 2'-fluorocytidine
  modified_base 6: mod_base = um
  modified_base 7: mod_base = OTHER; note = 2'-fluorouridine
  modified_base 8: mod_base = um
  modified_base 9: mod_base = gm
  modified_base 10: mod_base = cm
  modified_base 11: mod_base = OTHER; note = 2'-O-methyladenosine
  modified_base 12: mod_base = um
  modified_base 13: mod_base = gm
  modified_base 14: mod_base = OTHER; note = 2'-fluorocytidine
  modified_base 15: mod_base = um
  modified_base 16: mod_base = OTHER; note = 2'-fluorocytidine
  modified_base 17: mod_base = cm
  modified_base 18: mod_base = um
  modified_base 19: mod_base = um
  modified_base 20: mod_base = gm
  modified_base 21: mod_base = OTHER; note = 2'-O-methyladenosine with a 3'-phosphorothioate linkage
  modified_base 22: mod_base = OTHER; note = 2'-O-methyladenosine with a 3'-phosphorothioate linkage
  modified_base 23: mod_base = cm
ttatctttgcatgctccttgaac

SEQ ID NO: 1846 - RNA, 21 nt, synthetic construct
  source 1..21: mol_type = other RNA
  modified_base 1: mod_base = OTHER; note = 2'-O-methylcytidine with a 3'-phosphorothioate linkage
  modified_base 2: mod_base = OTHER; note = 2'-O-methyladenosine with a 3'-phosphorothioate linkage
  modified_base 3: mod_base = OTHER; note = 2'-O-methyladenosine
  modified_base 4: mod_base = gm
  modified_base 5: mod_base = gm
  modified_base 6: mod_base = OTHER; note = 2'-O-methyladenosine
  modified_base 7: mod_base = gm
  modified_base 8: mod_base = cm
  modified_base 9: mod_base = OTHER; note = 2'-fluoroadenosine
  modified_base 10: mod_base = OTHER; note = 2'-fluorouridine
  modified_base 11: mod_base = OTHER; note = 2'-fluoroguanosine
  modified_base 12: mod_base = cm
  modified_base 13: mod_base = OTHER; note = 2'-O-methyladenosine
  modified_base 14: mod_base = OTHER; note = 2'-O-methyladenosine
  modified_base 15: mod_base = OTHER; note = 2'-O-methyladenosine
  modified_base 16: mod_base = gm
  modified_base 17: mod_base = OTHER; note = 2'-O-methyladenosine
  modified_base 18: mod_base = um
  modified_base 19: mod_base = OTHER; note = 2'-O-methyladenosine with a 3'-phosphorothioate linkage
  modified_base 20: mod_base = OTHER; note = 2'-O-methyladenosine with a 3'-phosphorothioate linkage
  modified_base 21: mod_base = OTHER; note = 2'-O-methyladenosine
caaggagcatgcaaagataaa

SEQ ID NO: 1847 - RNA, 23 nt, synthetic construct
  source 1..23: mol_type = other RNA
  modified_base 1: mod_base = OTHER; note = 2'-O-methyluridine with a 3'-phosphorothioate linkage and a 5'-phosphate substitution
  modified_base 2: mod_base = OTHER; note = 2'-fluorouridine with a 3'-phosphorothioate linkage
  modified_base 3: mod_base = um
  modified_base 4: mod_base = OTHER; note = 2'-O-methyladenosine
  modified_base 5: mod_base = OTHER; note = 2'-fluorouridine
  modified_base 6: mod_base = cm
  modified_base 7: mod_base = OTHER; note = 2'-fluorouridine
  modified_base 8: mod_base = um
  modified_base 9: mod_base = um
  modified_base 10: mod_base = gm
  modified_base 11: mod_base = cm
  modified_base 12: mod_base = OTHER; note = 2'-O-methyladenosine
  modified_base 13: mod_base = um
  modified_base 14: mod_base = OTHER; note = 2'-fluoroguanosine
  modified_base 15: mod_base = cm
  modified_base 16: mod_base = OTHER; note = 2'-fluorouridine
  modified_base 17: mod_base = cm
  modified_base 18: mod_base = cm
  modified_base 19: mod_base = um
  modified_base 20: mod_base = um
  modified_base 21: mod_base = OTHER; note = 2'-O-methylguanosine with a 3'-phosphorothioate linkage
  modified_base 22: mod_base = OTHER; note = 2'-O-methyladenosine with a 3'-phosphorothioate linkage
  modified_base 23: mod_base = OTHER; note = 2'-O-methyladenosine
tttatctttgcatgctccttgaa

SEQ ID NO: 1848 - RNA, 21 nt, synthetic construct
  source 1..21: mol_type = other RNA
  modified_base 1: mod_base = OTHER; note = 2'-O-methyladenosine with a 3'-phosphorothioate linkage
  modified_base 2: mod_base = OTHER; note = 2'-O-methyladenosine with a 3'-phosphorothioate linkage
  modified_base 3: mod_base = gm
  modified_base 4: mod_base = gm
  modified_base 5: mod_base = OTHER; note = 2'-O-methyladenosine
  modified_base 6: mod_base = gm
  modified_base 7: mod_base = cm
  modified_base 8: mod_base = OTHER; note = 2'-O-methyladenosine
  modified_base 9: mod_base = OTHER; note = 2'-fluorouridine
  modified_base 10: mod_base = OTHER; note = 2'-fluoroguanosine
  modified_base 11: mod_base = OTHER; note = 2'-fluorocytidine
  modified_base 12: mod_base = OTHER; note = 2'-O-methyladenosine
  modified_base 13: mod_base = OTHER; note = 2'-O-methyladenosine
  modified_base 14: mod_base = OTHER; note = 2'-O-methyladenosine
  modified_base 15: mod_base = gm
  modified_base 16: mod_base = OTHER; note = 2'-O-methyladenosine
  modified_base 17: mod_base = um
  modified_base 18: mod_base = OTHER; note = 2'-O-methyladenosine
  modified_base 19: mod_base = OTHER; note = 2'-O-methyladenosine with a 3'-phosphorothioate linkage
  modified_base 20: mod_base = OTHER; note = 2'-O-methyluridine with a 3'-phosphorothioate linkage
  modified_base 21: mod_base = OTHER; note = 2'-O-methyladenosine
aaggagcatgcaaagataata

SEQ ID NO: 1849 - RNA, 23 nt, synthetic construct
  source 1..23: mol_type = other RNA
  modified_base 1: mod_base = OTHER; note = 2'-O-methyluridine with a 3'-phosphorothioate linkage and a 5'-phosphate substitution
  modified_base 2: mod_base = OTHER; note = 2'-fluoroadenosine with a 3'-phosphorothioate linkage
  modified_base 3: mod_base = um
  modified_base 4: mod_base = um
  modified_base 5: mod_base = OTHER; note = 2'-fluoroadenosine
  modified_base 6: mod_base = um
  modified_base 7: mod_base = OTHER; note = 2'-fluorocytidine
  modified_base 8: mod_base = um
  modified_base 9: mod_base = um
  modified_base 10: mod_base = um
  modified_base 11: mod_base = gm
  modified_base 12: mod_base = cm
  modified_base 13: mod_base = OTHER; note = 2'-O-methyladenosine
  modified_base 14: mod_base = OTHER; note = 2'-fluorouridine
  modified_base 15: mod_base = gm
  modified_base 16: mod_base = OTHER; note = 2'-fluorocytidine
  modified_base 17: mod_base = um
  modified_base 18: mod_base = cm
  modified_base 19: mod_base = cm
  modified_base 20: mod_base = um
  modified_base 21: mod_base = OTHER; note = 2'-O-methyluridine with a 3'-phosphorothioate linkage
  modified_base 22: mod_base = OTHER; note = 2'-O-methylguanosine with a 3'-phosphorothioate linkage
  modified_base 23: mod_base = OTHER; note = 2'-O-methyladenosine
tattatctttgcatgctccttga

SEQ ID NO: 1850 - RNA, 21 nt, synthetic construct
  source 1..21: mol_type = other RNA
  modified_base 1: mod_base = OTHER; note = 2'-O-methyladenosine with a 3'-phosphorothioate linkage
  modified_base 2: mod_base = OTHER; note = 2'-O-methylguanosine with a 3'-phosphorothioate linkage
  modified_base 3: mod_base = gm
  modified_base 4: mod_base = OTHER; note = 2'-O-methyladenosine
  modified_base 5: mod_base = gm
  modified_base 6: mod_base = cm
  modified_base 7: mod_base = OTHER; note = 2'-O-methyladenosine
  modified_base 8: mod_base = um
  modified_base 9: mod_base = OTHER; note = 2'-fluoroguanosine
  modified_base 10: mod_base = OTHER; note = 2'-fluorocytidine
  modified_base 11: mod_base = OTHER; note = 2'-fluoroadenosine
  modified_base 12: mod_base = OTHER; note = 2'-O-methyladenosine
  modified_base 13: mod_base = OTHER; note = 2'-O-methyladenosine
  modified_base 14: mod_base = gm
  modified_base 15: mod_base = OTHER; note = 2'-O-methyladenosine
  modified_base 16: mod_base = um
  modified_base 17: mod_base = OTHER; note = 2'-O-methyladenosine
  modified_base 18: mod_base = OTHER; note = 2'-O-methyladenosine
  modified_base 19: mod_base = OTHER; note = 2'-O-methyluridine with a 3'-phosphorothioate linkage
  modified_base 20: mod_base = OTHER; note = 2'-O-methylcytidine with a 3'-phosphorothioate linkage
  modified_base 21: mod_base = OTHER; note = 2'-O-methyladenosine
aggagcatgcaaagataatca

SEQ ID NO: 1851 - RNA, 23 nt, synthetic construct
  source 1..23: mol_type = other RNA
  modified_base 1: mod_base = OTHER; note = 2'-O-methyluridine with a 3'-phosphorothioate linkage and a 5'-phosphate substitution
  modified_base 2: mod_base = OTHER; note = 2'-fluoroguanosine with a 3'-phosphorothioate linkage
  modified_base 3: mod_base = OTHER; note = 2'-O-methyladenosine
  modified_base 4: mod_base = um
  modified_base 5: mod_base = OTHER; note = 2'-fluorouridine
  modified_base 6: mod_base = OTHER; note = 2'-O-methyladenosine
  modified_base 7: mod_base = OTHER; note = 2'-fluorouridine
  modified_base 8: mod_base = cm
  modified_base 9: mod_base = um
  modified_base 10: mod_base = um
  modified_base 11: mod_base = um
  modified_base 12: mod_base = gm
  modified_base 13: mod_base = cm
  modified_base 14: mod_base = OTHER; note = 2'-fluoroadenosine
  modified_base 15: mod_base = um
  modified_base 16: mod_base = OTHER; note = 2'-fluoroguanosine
  modified_base 17: mod_base = cm
  modified_base 18: mod_base = um
  modified_base 19: mod_base = cm
  modified_base 20: mod_base = cm
  modified_base 21: mod_base = OTHER; note = 2'-O-methyluridine with a 3'-phosphorothioate linkage
  modified_base 22: mod_base = OTHER; note = 2'-O-methyluridine with a 3'-phosphorothioate linkage
  modified_base 23: mod_base = gm
tgattatctttgcatgctccttg

SEQ ID NO: 1852 - RNA, 21 nt, synthetic construct
  source 1..21: mol_type = other RNA
  modified_base 1: mod_base = OTHER; note = 2'-O-methylguanosine with a 3'-phosphorothioate linkage
  modified_base 2: mod_base = OTHER; note = 2'-O-methylguanosine with a 3'-phosphorothioate linkage
  modified_base 3: mod_base = OTHER; note = 2'-O-methyladenosine
  modified_base 4: mod_base = gm
  modified_base 5: mod_base = cm
  modified_base 6: mod_base = OTHER; note = 2'-O-methyladenosine
  modified_base 7: mod_base = um
  modified_base 8: mod_base = gm
  modified_base 9: mod_base = OTHER; note = 2'-fluorocytidine
  modified_base 10: mod_base = OTHER; note = 2'-fluoroadenosine
  modified_base 11: mod_base = OTHER; note = 2'-fluoroadenosine
  modified_base 12: mod_base = OTHER; note = 2'-O-methyladenosine
  modified_base 13: mod_base = gm
  modified_base 14: mod_base = OTHER; note = 2'-O-methyladenosine
  modified_base 15: mod_base = um
  modified_base 16: mod_base = OTHER; note = 2'-O-methyladenosine
  modified_base 17: mod_base = OTHER; note = 2'-O-methyladenosine
  modified_base 18: mod_base = um
  modified_base 19: mod_base = OTHER; note = 2'-O-methylcytidine with a 3'-phosphorothioate linkage
  modified_base 20: mod_base = OTHER; note = 2'-O-methylcytidine with a 3'-phosphorothioate linkage
  modified_base 21: mod_base = OTHER; note = 2'-O-methyladenosine
ggagcatgcaaagataatcca

SEQ ID NO: 1853 - RNA, 23 nt, synthetic construct
  source 1..23: mol_type = other RNA
  modified_base 1: mod_base = OTHER; note = 2'-O-methyluridine with a 3'-phosphorothioate linkage and a 5'-phosphate substitution
  modified_base 2: mod_base = OTHER; note = 2'-fluoroguanosine with a 3'-phosphorothioate linkage
  modified_base 3: mod_base = gm
  modified_base 4: mod_base = OTHER; note = 2'-O-methyladenosine
  modified_base 5: mod_base = OTHER; note = 2'-fluorouridine
  modified_base 6: mod_base = um
  modified_base 7: mod_base = OTHER; note = 2'-fluoroadenosine
  modified_base 8: mod_base = um
  modified_base 9: mod_base = cm
  modified_base 10: mod_base = um
  modified_base 11: mod_base = um
  modified_base 12: mod_base = um
  modified_base 13: mod_base = gm
  modified_base 14: mod_base = OTHER; note = 2'-fluorocytidine
  modified_base 15: mod_base = OTHER; note = 2'-O-methyladenosine
  modified_base 16: mod_base = OTHER; note = 2'-fluorouridine
  modified_base 17: mod_base = gm
  modified_base 18: mod_base = cm
  modified_base 19: mod_base = um
  modified_base 20: mod_base = cm
  modified_base 21: mod_base = OTHER; note = 2'-O-methylcytidine with a 3'-phosphorothioate linkage
  modified_base 22: mod_base = OTHER; note = 2'-O-methyluridine with a 3'-phosphorothioate linkage
  modified_base 23: mod_base = um
tggattatctttgcatgctcctt

SEQ ID NO: 1854 - RNA, 21 nt, synthetic construct
  source 1..21: mol_type = other RNA
  modified_base 1: mod_base = OTHER; note = 2'-O-methyluridine with a 3'-phosphorothioate linkage
  modified_base 2: mod_base = OTHER; note = 2'-O-methylguanosine with a 3'-phosphorothioate linkage
  modified_base 3: mod_base = cm
  modified_base 4: mod_base = cm
  modified_base 5: mod_base = cm
  modified_base 6: mod_base = gm
  modified_base 7: mod_base = gm
  modified_base 8: mod_base = cm
  modified_base 9: mod_base = OTHER; note = 2'-fluoroadenosine
  modified_base 10: mod_base = OTHER; note = 2'-fluoroguanosine
  modified_base 11: mod_base = OTHER; note = 2'-fluorocytidine
  modified_base 12: mod_base = um
  modified_base 13: mod_base = um
  modified_base 14: mod_base = gm
  modified_base 15: mod_base = cm
  modified_base 16: mod_base = cm
  modified_base 17: mod_base = cm
  modified_base 18: mod_base = gm
  modified_base 19: mod_base = OTHER; note = 2'-O-methyladenosine with a 3'-phosphorothioate linkage
  modified_base 20: mod_base = OTHER; note = 2'-O-methyladenosine with a 3'-phosphorothioate linkage
  modified_base 21: mod_base = OTHER; note = 2'-O-methyladenosine
tgcccggcagcttgcccgaaa

SEQ ID NO: 1855 - RNA, 23 nt, synthetic construct
  source 1..23: mol_type = other RNA
  modified_base 1: mod_base = OTHER; note = 2'-O-methyluridine with a 3'-phosphorothioate linkage and a 5'-phosphate substitution
  modified_base 2: mod_base = OTHER; note = 2'-fluorouridine with a 3'-phosphorothioate linkage
  modified_base 3: mod_base = um
  modified_base 4: mod_base = cm
  modified_base 5: mod_base = OTHER; note = 2'-fluoroguanosine
  modified_base 6: mod_base = gm
  modified_base 7: mod_base = OTHER; note = 2'-fluoroguanosine
  modified_base 8: mod_base = cm
  modified_base 9: mod_base = OTHER; note = 2'-O-methyladenosine
  modified_base 10: mod_base = OTHER; note = 2'-O-methyladenosine
  modified_base 11: mod_base = gm
  modified_base 12: mod_base = cm
  modified_base 13: mod_base = um
  modified_base 14: mod_base = OTHER; note = 2'-fluoroguanosine
  modified_base 15: mod_base = cm
  modified_base 16: mod_base = OTHER; note = 2'-fluorocytidine
  modified_base 17: mod_base = gm
  modified_base 18: mod_base = gm
  modified_base 19: mod_base = gm
  modified_base 20: mod_base = cm
  modified_base 21: mod_base = OTHER; note = 2'-O-methyladenosine with a 3'-phosphorothioate linkage
  modified_base 22: mod_base = OTHER; note = 2'-O-methyluridine with a 3'-phosphorothioate linkage
  modified_base 23: mod_base = um
tttcgggcaagctgccgggcatt

SEQ ID NO: 1856 - RNA, 21 nt, synthetic construct
  source 1..21: mol_type = other RNA
  modified_base 1: mod_base = OTHER; note = 2'-O-methylguanosine with a 3'-phosphorothioate linkage
  modified_base 2: mod_base = OTHER; note = 2'-O-methylguanosine with a 3'-phosphorothioate linkage
  modified_base 3: mod_base = cm
  modified_base 4: mod_base = OTHER; note = 2'-O-methyladenosine
  modified_base 5: mod_base = gm
  modified_base 6: mod_base = cm
  modified_base 7: mod_base = um
  modified_base 8: mod_base = um
  modified_base 9: mod_base = OTHER; note = 2'-fluoroguanosine
  modified_base 10: mod_base = OTHER; note = 2'-fluorocytidine
  modified_base 11: mod_base = OTHER; note = 2'-fluorocytidine
  modified_base 12: mod_base = cm
  modified_base 13: mod_base = gm
  modified_base 14: mod_base = OTHER; note = 2'-O-methyladenosine
  modified_base 15: mod_base = OTHER; note = 2'-O-methyladenosine
  modified_base 16: mod_base = um
  modified_base 17: mod_base = um
  modified_base 18: mod_base = gm
  modified_base 19: mod_base = OTHER; note = 2'-O-methyluridine with a 3'-phosphorothioate linkage
  modified_base 20: mod_base = OTHER; note = 2'-O-methylguanosine with a 3'-phosphorothioate linkage
  modified_base 21: mod_base = OTHER; note = 2'-O-methyladenosine
ggcagcttgcccgaattgtga

SEQ ID NO: 1857 - RNA, 23 nt, synthetic construct
  source 1..23: mol_type = other RNA
  modified_base 1: mod_base = OTHER; note = 2'-O-methyluridine with a 3'-phosphorothioate linkage and a 5'-phosphate substitution
  modified_base 2: mod_base = OTHER; note = 2'-fluorocytidine with a 3'-phosphorothioate linkage
  modified_base 3: mod_base = OTHER; note = 2'-O-methyladenosine
  modified_base 4: mod_base = cm
  modified_base 5: mod_base = OTHER; note = 2'-fluoroadenosine
  modified_base 6: mod_base = OTHER; note = 2'-O-methyladenosine
  modified_base 7: mod_base = OTHER; note = 2'-fluorouridine
  modified_base 8: mod_base = um
  modified_base 9: mod_base = cm
  modified_base 10: mod_base = gm
  modified_base 11: mod_base = gm
  modified_base 12: mod_base = gm
  modified_base 13: mod_base = cm
  modified_base 14: mod_base = OTHER; note = 2'-fluoroadenosine
  modified_base 15: mod_base = OTHER; note = 2'-O-methyladenosine
  modified_base 16: mod_base = OTHER; note = 2'-fluoroguanosine
  modified_base 17: mod_base = cm
  modified_base 18: mod_base = um
  modified_base 19: mod_base = gm
  modified_base 20: mod_base = cm
  modified_base 21: mod_base = OTHER; note = 2'-O-methylcytidine with a 3'-phosphorothioate linkage
  modified_base 22: mod_base = OTHER; note = 2'-O-methylguanosine with a 3'-phosphorothioate linkage
  modified_base 23: mod_base = gm
tcacaattcgggcaagctgccgg

SEQ ID NO: 1858 - RNA, 21 nt, synthetic construct
  source 1..21: mol_type = other RNA
  modified_base 1: mod_base = OTHER; note = 2'-O-methylguanosine with a 3'-phosphorothioate linkage
  modified_base 2: mod_base = OTHER; note = 2'-O-methylcytidine with a 3'-phosphorothioate linkage
  modified_base 3: mod_base = OTHER; note = 2'-O-methyladenosine
  modified_base 4: mod_base = gm
  modified_base 5: mod_base = cm
  modified_base 6: mod_base = um
  modified_base 7: mod_base = um
  modified_base 8: mod_base = gm
  modified_base 9: mod_base = OTHER; note = 2'-fluorocytidine
  modified_base 10: mod_base = OTHER; note = 2'-fluorocytidine
  modified_base 11: mod_base = OTHER; note = 2'-fluorocytidine
  modified_base 12: mod_base = gm
  modified_base 13: mod_base = OTHER; note = 2'-O-methyladenosine
  modified_base 14: mod_base = OTHER; note = 2'-O-methyladenosine
  modified_base 15: mod_base = um
  modified_base 16: mod_base = um
  modified_base 17: mod_base = gm
  modified_base 18: mod_base = um
  modified_base 19: mod_base = OTHER; note = 2'-O-methylguanosine with a 3'-phosphorothioate linkage
  modified_base 20: mod_base = OTHER; note = 2'-O-methyluridine with a 3'-phosphorothioate linkage
  modified_base 21: mod_base = OTHER; note = 2'-O-methyladenosine
gcagcttgcccgaattgtgta

SEQ ID NO: 1859 - RNA, 23 nt, synthetic construct
  source 1..23: mol_type = other RNA
  modified_base 1: mod_base = OTHER; note = 2'-O-methyluridine with a 3'-phosphorothioate linkage and a 5'-phosphate substitution
  modified_base 2: mod_base = OTHER; note = 2'-fluoroadenosine with a 3'-phosphorothioate linkage
  modified_base 3: mod_base = cm
  modified_base 4: mod_base = OTHER; note = 2'-O-methyladenosine
  modified_base 5: mod_base = OTHER; note = 2'-fluorocytidine
  modified_base 6: mod_base = OTHER; note = 2'-O-methyladenosine
  modified_base 7: mod_base = OTHER; note = 2'-fluoroadenosine
  modified_base 8: mod_base = um
  modified_base 9: mod_base = um
  modified_base 10: mod_base = cm
  modified_base 11: mod_base = gm
  modified_base 12: mod_base = gm
  modified_base 13: mod_base = gm
  modified_base 14: mod_base = OTHER; note = 2'-fluorocytidine
  modified_base 15: mod_base = OTHER; note = 2'-O-methyladenosine
  modified_base 16: mod_base = OTHER; note = 2'-fluoroadenosine
  modified_base 17: mod_base = gm
  modified_base 18: mod_base = cm
  modified_base 19: mod_base = um
  modified_base 20: mod_base = gm
  modified_base 21: mod_base = OTHER; note = 2'-O-methylcytidine with a 3'-phosphorothioate linkage
  modified_base 22: mod_base = OTHER; note = 2'-O-methylcytidine with a 3'-phosphorothioate linkage
  modified_base 23: mod_base = gm
tacacaattcgggcaagctgccg

SEQ ID NO: 1860 - RNA, 21 nt, synthetic construct
  source 1..21: mol_type = other RNA
  modified_base 1: mod_base = OTHER; note = 2'-O-methylcytidine with a 3'-phosphorothioate linkage
  modified_base 2: mod_base = OTHER; note = 2'-O-methyladenosine with a 3'-phosphorothioate linkage
  modified_base 3: mod_base = gm
  modified_base 4: mod_base = cm
  modified_base 5: mod_base = um
  modified_base 6: mod_base = um
  modified_base 7: mod_base = gm
  modified_base 8: mod_base = cm
  modified_base 9: mod_base = OTHER; note = 2'-fluorocytidine
  modified_base 10: mod_base = OTHER; note = 2'-fluorocytidine
  modified_base 11: mod_base = OTHER; note = 2'-fluoroguanosine
  modified_base 12: mod_base = OTHER; note = 2'-O-methyladenosine
  modified_base 13: mod_base = OTHER; note = 2'-O-methyladenosine
  modified_base 14: mod_base = um
  modified_base 15: mod_base = um
  modified_base 16: mod_base = gm
  modified_base 17: mod_base = um
  modified_base 18: mod_base = gm
  modified_base 19: mod_base = OTHER; note = 2'-O-methyluridine with a 3'-phosphorothioate linkage
  modified_base 20: mod_base = OTHER; note = 2'-O-methylguanosine with a 3'-phosphorothioate linkage
  modified_base 21: mod_base = OTHER; note = 2'-O-methyladenosine
cagcttgcccgaattgtgtga

SEQ ID NO: 1861 - RNA, 23 nt, synthetic construct
  source 1..23: mol_type = other RNA
  modified_base 1: mod_base = OTHER; note = 2'-O-methyluridine with a 3'-phosphorothioate linkage and a 5'-phosphate substitution
  modified_base 2: mod_base = OTHER; note = 2'-fluorocytidine with a 3'-phosphorothioate linkage
  modified_base 3: mod_base = OTHER; note = 2'-O-methyladenosine
  modified_base 4: mod_base = cm
  modified_base 5: mod_base = OTHER; note = 2'-fluoroadenosine
  modified_base 6: mod_base = cm
  modified_base 7: mod_base = OTHER; note = 2'-fluoroadenosine
  modified_base 8: mod_base = OTHER; note = 2'-O-methyladenosine
  modified_base 9: mod_base = um
  modified_base 10: mod_base = um
  modified_base 11: mod_base = cm
  modified_base 12: mod_base = gm
  modified_base 13: mod_base = gm
  modified_base 14: mod_base = OTHER; note = 2'-fluoroguanosine
  modified_base 15: mod_base = cm
  modified_base 16: mod_base = OTHER; note = 2'-fluoroadenosine
  modified_base 17: mod_base = OTHER; note = 2'-O-methyladenosine
  modified_base 18: mod_base = gm
  modified_base 19: mod_base = cm
  modified_base 20: mod_base = um
  modified_base 21: mod_base = OTHER; note = 2'-O-methylguanosine with a 3'-phosphorothioate linkage
  modified_base 22: mod_base = OTHER; note = 2'-O-methylcytidine with a 3'-phosphorothioate linkage
  modified_base 23: mod_base = cm
tcacacaattcgggcaagctgcc

SEQ ID NO: 1862 - RNA, 21 nt, synthetic construct
  source 1..21: mol_type = other RNA
  modified_base 1: mod_base = OTHER; note = 2'-O-methylguanosine with a 3'-phosphorothioate linkage
  modified_base 2: mod_base = OTHER; note = 2'-O-methylguanosine with a 3'-phosphorothioate linkage
  modified_base 3: mod_base = cm
  modified_base 4: mod_base = OTHER; note = 2'-O-methyladenosine
  modified_base 5: mod_base = gm
  modified_base 6: mod_base = cm
  modified_base 7: mod_base = OTHER; note = 2'-O-methyladenosine
  modified_base 8: mod_base = um
  modified_base 9: mod_base = OTHER; note = 2'-fluorouridine
  modified_base 10: mod_base = OTHER; note = 2'-fluoroguanosine
  modified_base 11: mod_base = OTHER; note = 2'-fluoroguanosine
  modified_base 12: mod_base = cm
  modified_base 13: mod_base = OTHER; note = 2'-O-methyladenosine
  modified_base 14: mod_base = gm
  modified_base 15: mod_base = cm
  modified_base 16: mod_base = OTHER; note = 2'-O-methyladenosine
  modified_base 17: mod_base = gm
  modified_base 18: mod_base = gm
  modified_base 19: mod_base = OTHER; note = 2'-O-methyladenosine with a 3'-phosphorothioate linkage
  modified_base 20: mod_base = OTHER; note = 2'-O-methylcytidine with a 3'-phosphorothioate linkage
  modified_base 21: mod_base = OTHER; note = 2'-O-methyladenosine
ggcagcattggcagcaggaca

SEQ ID NO: 1863 - RNA, 23 nt, synthetic construct
  source 1..23: mol_type = other RNA
  modified_base 1: mod_base = OTHER; note = 2'-O-methyluridine with a 3'-phosphorothioate linkage and a 5'-phosphate substitution
  modified_base 2: mod_base = OTHER; note = 2'-fluoroguanosine with a 3'-phosphorothioate linkage
  modified_base 3: mod_base = um
  modified_base 4: mod_base = cm
  modified_base 5: mod_base = OTHER; note = 2'-fluorocytidine
  modified_base 6: mod_base = um
  modified_base 7: mod_base = OTHER; note = 2'-fluoroguanosine
  modified_base 8: mod_base = cm
  modified_base 9: mod_base = um
  modified_base 10: mod_base = gm
  modified_base 11: mod_base = cm
  modified_base 12: mod_base = cm
  modified_base 13: mod_base = OTHER; note = 2'-O-methyladenosine
  modified_base 14: mod_base = OTHER; note = 2'-fluoroadenosine
  modified_base 15: mod_base = um
  modified_base 16: mod_base = OTHER; note = 2'-fluoroguanosine
  modified_base 17: mod_base = cm
  modified_base 18: mod_base = um
  modified_base 19: mod_base = gm
  modified_base 20: mod_base = cm
  modified_base 21: mod_base = OTHER; note = 2'-O-methylcytidine with a 3'-phosphorothioate linkage
  modified_base 22: mod_base = OTHER; note = 2'-O-methyladenosine with a 3'-phosphorothioate linkage
  modified_base 23: mod_base = um
tgtcctgctgccaatgctgccat

SEQ ID NO: 1864 - RNA, 21 nt, synthetic construct
  source 1..21: mol_type = other RNA
  modified_base 1: mod_base = OTHER; note = 2'-O-methylguanosine with a 3'-phosphorothioate linkage
  modified_base 2: mod_base = OTHER; note = 2'-O-methylcytidine with a 3'-phosphorothioate linkage
  modified_base 3: mod_base = OTHER; note = 2'-O-methyladenosine
  modified_base 4: mod_base = gm
  modified_base 5: mod_base = cm
  modified_base 6: mod_base = OTHER; note = 2'-O-methyladenosine
  modified_base 7: mod_base = um
  modified_base 8: mod_base = um
  modified_base 9: mod_base = OTHER; note = 2'-fluoroguanosine
  modified_base 10: mod_base = OTHER; note = 2'-fluoroguanosine
  modified_base 11: mod_base = OTHER; note = 2'-fluorocytidine
  modified_base 12: mod_base = OTHER; note = 2'-O-methyladenosine
  modified_base 13: mod_base = gm
  modified_base 14: mod_base = cm
  modified_base 15: mod_base = OTHER; note = 2'-O-methyladenosine
  modified_base 16: mod_base = gm
  modified_base 17: mod_base = gm
  modified_base 18: mod_base = OTHER; note = 2'-O-methyladenosine
  modified_base 19: mod_base = OTHER; note = 2'-O-methylcytidine with a 3'-phosphorothioate linkage
  modified_base 20: mod_base = OTHER; note = 2'-O-methyladenosine with a 3'-phosphorothioate linkage
  modified_base 21: mod_base = OTHER; note = 2'-O-methyladenosine
gcagcattggcagcaggacaa

SEQ ID NO: 1865 - RNA, 23 nt, synthetic construct
  source 1..23: mol_type = other RNA
  modified_base 1: mod_base = OTHER; note = 2'-O-methyluridine with a 3'-phosphorothioate linkage and a 5'-phosphate substitution
  modified_base 2: mod_base = OTHER; note = 2'-fluorouridine with a 3'-phosphorothioate linkage
  modified_base 3: mod_base = gm
  modified_base 4: mod_base = um
  modified_base 5: mod_base = OTHER; note = 2'-fluorocytidine
  modified_base 6: mod_base = cm
  modified_base 7: mod_base = OTHER; note = 2'-fluorouridine
  modified_base 8: mod_base = gm
  modified_base 9: mod_base = cm
  modified_base 10: mod_base = um
  modified_base 11: mod_base = gm
  modified_base 12: mod_base = cm
  modified_base 13: mod_base = cm
  modified_base 14: mod_base = OTHER; note = 2'-fluoroadenosine
  modified_base 15: mod_base = OTHER; note = 2'-O-methyladenosine
  modified_base 16: mod_base = OTHER; note = 2'-fluorouridine
  modified_base 17: mod_base = gm
  modified_base 18: mod_base = cm
  modified_base 19: mod_base = um
  modified_base 20: mod_base = gm
  modified_base 21: mod_base = OTHER; note = 2'-O-methylcytidine with a 3'-phosphorothioate linkage
  modified_base 22: mod_base = OTHER; note = 2'-O-methylcytidine with a 3'-phosphorothioate linkage
  modified_base 23: mod_base = OTHER; note = 2'-O-methyladenosine
ttgtcctgctgccaatgctgcca

SEQ ID NO: 1866 - RNA, 21 nt, synthetic construct
  source 1..21: mol_type = other RNA
  modified_base 1: mod_base = OTHER; note = 2'-O-methylcytidine with a 3'-phosphorothioate linkage
  modified_base 2: mod_base = OTHER; note = 2'-O-methyladenosine with a 3'-phosphorothioate linkage
  modified_base 3: mod_base = gm
  modified_base 4: mod_base = cm
  modified_base 5: mod_base = OTHER; note = 2'-O-methyladenosine
  modified_base 6: mod_base = um
  modified_base 7: mod_base = um
  modified_base 8: mod_base = gm
  modified_base 9: mod_base = OTHER; note = 2'-fluoroguanosine
  modified_base 10: mod_base = OTHER; note = 2'-fluorocytidine
  modified_base 11: mod_base = OTHER; note = 2'-fluoroadenosine
  modified_base 12: mod_base = gm
  modified_base 13: mod_base = cm
  modified_base 14: mod_base = OTHER; note = 2'-O-methyladenosine
  modified_base 15: mod_base = gm
  modified_base 16: mod_base = gm
  modified_base 17: mod_base = OTHER; note = 2'-O-methyladenosine
  modified_base 18: mod_base = cm
  modified_base 19: mod_base = OTHER; note = 2'-O-methyladenosine with a 3'-phosphorothioate linkage
  modified_base 20: mod_base = OTHER; note = 2'-O-methyluridine with a 3'-phosphorothioate linkage
  modified_base 21: mod_base = OTHER; note = 2'-O-methyladenosine
cagcattggcagcaggacata

SEQ ID NO: 1867 - RNA, 23 nt, synthetic construct
  source 1..23: mol_type = other RNA
  modified_base 1: mod_base = OTHER; note = 2'-O-methyluridine with a 3'-phosphorothioate linkage and a 5'-phosphate substitution
  modified_base 2: mod_base = OTHER; note = 2'-fluoroadenosine with a 3'-phosphorothioate linkage
  modified_base 3: mod_base = um
  modified_base 4: mod_base = gm
  modified_base 5: mod_base = OTHER; note = 2'-fluorouridine
  modified_base 6: mod_base = cm
  modified_base 7: mod_base = OTHER; note = 2'-fluorocytidine
  modified_base 8: mod_base = um
  modified_base 9: mod_base = gm
  modified_base 10: mod_base = cm
  modified_base 11: mod_base = um
  modified_base 12: mod_base = gm
  modified_base 13: mod_base = cm
  modified_base 14: mod_base = OTHER; note = 2'-fluorocytidine
  modified_base 15: mod_base = OTHER; note = 2'-O-methyladenosine
  modified_base 16: mod_base = OTHER; note = 2'-fluoroadenosine
  modified_base 17: mod_base = um
  modified_base 18: mod_base = gm
  modified_base 19: mod_base = cm
  modified_base 20: mod_base = um
  modified_base 21: mod_base = OTHER; note = 2'-O-methylguanosine with a 3'-phosphorothioate linkage
  modified_base 22: mod_base = OTHER; note = 2'-O-methylcytidine with a 3'-phosphorothioate linkage
  modified_base 23: mod_base = cm
tatgtcctgctgccaatgctgcc

SEQ ID NO: 1868 - RNA, 21 nt, synthetic construct
  source 1..21: mol_type = other RNA
  modified_base 1: mod_base = OTHER; note = 2'-O-methylcytidine with a 3'-phosphorothioate linkage
  modified_base 2: mod_base = OTHER; note = 2'-O-methyladenosine with a 3'-phosphorothioate linkage
  modified_base 3: mod_base = gm
  modified_base 4: mod_base = cm
  modified_base 5: mod_base = OTHER; note = 2'-O-methyladenosine
  modified_base 6: mod_base = gm
  modified_base 7: mod_base = gm
  modified_base 8: mod_base = OTHER; note = 2'-O-methyladenosine
  modified_base 9: mod_base = OTHER; note = 2'-fluorocytidine
  modified_base 10: mod_base = OTHER; note = 2'-fluoroadenosine
  modified_base 11: mod_base = OTHER; note = 2'-fluorouridine
  modified_base 12: mod_base = cm
  modified_base 13: mod_base = um
  modified_base 14: mod_base = um
  modified_base 15: mod_base = gm
  modified_base 16: mod_base = um
  modified_base 17: mod_base = cm
  modified_base 18: mod_base = OTHER; note = 2'-O-methyladenosine
  modified_base 19: mod_base = OTHER; note = 2'-O-methyladenosine with a 3'-phosphorothioate linkage
  modified_base 20: mod_base = OTHER; note = 2'-O-methyladenosine with a 3'-phosphorothioate linkage
  modified_base 21: mod_base = OTHER; note = 2'-O-methyladenosine
cagcaggacatcttgtcaaaa

SEQ ID NO: 1869 - RNA, 23 nt, synthetic construct
  source 1..23: mol_type = other RNA
  modified_base 1: mod_base = OTHER; note = 2'-O-methyluridine with a 3'-phosphorothioate linkage and a 5'-phosphate substitution
  modified_base 2: mod_base = OTHER; note = 2'-fluorouridine with a 3'-phosphorothioate linkage
  modified_base 3: mod_base = um
  modified_base 4: mod_base = um
  modified_base 5: mod_base = OTHER; note = 2'-fluoroguanosine
  modified_base 6: mod_base = OTHER; note = 2'-O-methyladenosine
  modified_base 7: mod_base = OTHER; note = 2'-fluorocytidine
  modified_base 8: mod_base = OTHER; note = 2'-O-methyladenosine
  modified_base 9: mod_base = OTHER; note = 2'-O-methyladenosine
  modified_base 10: mod_base = gm
  modified_base 11: mod_base = OTHER; note = 2'-O-methyladenosine
  modified_base 12: mod_base = um
  modified_base 13: mod_base = gm
  modified_base 14: mod_base = OTHER; note = 2'-fluorouridine
  modified_base 15: mod_base = cm
  modified_base 16: mod_base = OTHER; note = 2'-fluorocytidine
  modified_base 17: mod_base = um
  modified_base 18: mod_base = gm
  modified_base 19: mod_base = cm
  modified_base 20: mod_base = um
  modified_base 21: mod_base = OTHER; note = 2'-O-methylguanosine with a 3'-phosphorothioate linkage
  modified_base 22: mod_base = OTHER; note = 2'-O-methylcytidine with a 3'-phosphorothioate linkage
  modified_base 23: mod_base = cm
ttttgacaagatgtcctgctgcc

SEQ ID NO: 1870 - RNA, 21 nt, synthetic construct
  source 1..21: mol_type = other RNA
  modified_base 1: mod_base = OTHER; note = 2'-O-methyladenosine with a 3'-phosphorothioate linkage
  modified_base 2: mod_base = OTHER; note = 2'-O-methylguanosine with a 3'-phosphorothioate linkage
  modified_base 3: mod_base = cm
  modified_base 4: mod_base = OTHER; note = 2'-O-methyladenosine
  modified_base 5: mod_base = gm
  modified_base 6: mod_base = gm
  modified_base 7: mod_base = OTHER; note = 2'-O-methyladenosine
  modified_base 8: mod_base = cm
  modified_base 9: mod_base = OTHER; note = 2'-fluoroadenosine
  modified_base 10: mod_base = OTHER; note = 2'-fluorouridine
  modified_base 11: mod_base = OTHER; note = 2'-fluorocytidine
  modified_base 12: mod_base = um
  modified_base 13: mod_base = um
  modified_base 14: mod_base = gm
  modified_base 15: mod_base = um
  modified_base 16: mod_base = cm
  modified_base 17: mod_base = OTHER; note = 2'-O-methyladenosine
  modified_base 18: mod_base = OTHER; note = 2'-O-methyladenosine
  modified_base 19: mod_base = OTHER; note = 2'-O-methyladenosine with a 3'-phosphorothioate linkage
  modified_base 20: mod_base = OTHER; note = 2'-O-methyladenosine with a 3'-phosphorothioate linkage
  modified_base 21: mod_base = OTHER; note = 2'-O-methyladenosine
agcaggacatcttgtcaaaaa

SEQ ID NO: 1871 - RNA, 23 nt, synthetic construct
  source 1..23: mol_type = other RNA
  modified_base 1: mod_base = OTHER; note = 2'-O-methyluridine with a 3'-phosphorothioate linkage and a 5'-phosphate substitution
  modified_base 2: mod_base = OTHER; note = 2'-fluorouridine with a 3'-phosphorothioate linkage
  modified_base 3: mod_base = um
  modified_base 4: mod_base = um
  modified_base 5: mod_base = OTHER; note = 2'-fluorouridine
  modified_base 6: mod_base = gm
  modified_base 7: mod_base = OTHER; note = 2'-fluoroadenosine
  modified_base 8: mod_base = cm
  modified_base 9: mod_base = OTHER; note = 2'-O-methyladenosine
  modified_base 10: mod_base = OTHER; note = 2'-O-methyladenosine
  modified_base 11: mod_base = gm
  modified_base 12: mod_base = OTHER; note = 2'-O-methyladenosine
  modified_base 13: mod_base = um
  modified_base 14: mod_base = OTHER; note = 2'-fluoroguanosine
  modified_base 15: mod_base = um
  modified_base 16: mod_base = OTHER; note = 2'-fluorocytidine
  modified_base 17: mod_base = cm
  modified_base 18: mod_base = um
  modified_base 19: mod_base = gm
  modified_base 20: mod_base = cm
  modified_base 21: mod_base = OTHER; note = 2'-O-methyluridine with a 3'-phosphorothioate linkage
  modified_base 22: mod_base = OTHER; note = 2'-O-methylguanosine with a 3'-phosphorothioate linkage
  modified_base 23: mod_base = cm
tttttgacaagatgtcctgctgc

SEQ ID NO: 1872 - RNA, 21 nt, synthetic construct
  source 1..21: mol_type = other RNA
  modified_base 1: mod_base = OTHER; note = 2'-O-methylcytidine with a 3'-phosphorothioate linkage
  modified_base 2: mod_base = OTHER; note = 2'-O-methyladenosine with a 3'-phosphorothioate linkage
  modified_base 3: mod_base = gm
  modified_base 4: mod_base = gm
  modified_base 5: mod_base = OTHER; note = 2'-O-methyladenosine
  modified_base 6: mod_base = cm
  modified_base 7: mod_base = OTHER; note = 2'-O-methyladenosine
  modified_base 8: mod_base = um
  modified_base 9: mod_base = OTHER; note = 2'-fluorocytidine
  modified_base 10: mod_base = OTHER; note = 2'-fluorouridine
  modified_base 11: mod_base = OTHER; note = 2'-fluorouridine
  modified_base 12: mod_base = gm
  modified_base 13: mod_base = um
  modified_base 14: mod_base = cm
  modified_base 15: mod_base = OTHER; note = 2'-O-methyladenosine
  modified_base 16: mod_base = OTHER; note = 2'-O-methyladenosine
  modified_base 17: mod_base = OTHER; note = 2'-O-methyladenosine
  modified_base 18: mod_base = OTHER; note = 2'-O-methyladenosine
  modified_base 19: mod_base = OTHER; note = 2'-O-methylguanosine with a 3'-phosphorothioate linkage
  modified_base 20: mod_base = OTHER; note = 2'-O-methyluridine with a 3'-phosphorothioate linkage
  modified_base 21: mod_base = OTHER; note = 2'-O-methyladenosine
caggacatcttgtcaaaagta

SEQ ID NO: 1873 - RNA, 23 nt, synthetic construct
  source 1..23: mol_type = other RNA
  modified_base 1: mod_base = OTHER; note = 2'-O-methyluridine with a 3'-phosphorothioate linkage and a 5'-phosphate substitution
  modified_base 2: mod_base = OTHER; note = 2'-fluoroadenosine with a 3'-phosphorothioate linkage
  modified_base 3: mod_base = cm
  modified_base 4: mod_base = um
  modified_base 5: mod_base = OTHER; note = 2'-fluorouridine
  modified_base 6: mod_base = um
  modified_base 7: mod_base = OTHER; note = 2'-fluorouridine
  modified_base 8: mod_base = gm
  modified_base 9: mod_base = OTHER; note = 2'-O-methyladenosine
  modified_base 10: mod_base = cm
  modified_base 11: mod_base = OTHER; note = 2'-O-methyladenosine
  modified_base 12: mod_base = OTHER; note = 2'-O-methyladenosine
  modified_base 13: mod_base = gm
  modified_base 14: mod_base = OTHER; note = 2'-fluoroadenosine
  modified_base 15: mod_base = um
  modified_base 16: mod_base = OTHER; note = 2'-fluoroguanosine
  modified_base 17: mod_base = um
  modified_base 18: mod_base = cm
  modified_base 19: mod_base = cm
  modified_base 20: mod_base = um
  modified_base 21: mod_base = OTHER; note = 2'-O-methylguanosine with a 3'-phosphorothioate linkage
  modified_base 22: mod_base = OTHER; note = 2'-O-methylcytidine with a 3'-phosphorothioate linkage
  modified_base 23: mod_base = um
tacttttgacaagatgtcctgct

SEQ ID NO: 1874 - RNA, 21 nt, synthetic construct
  source 1..21: mol_type = other RNA
  modified_base 1: mod_base = OTHER; note = 2'-O-methyladenosine with a 3'-phosphorothioate linkage
  modified_base 2: mod_base = OTHER; note = 2'-O-methylguanosine with a 3'-phosphorothioate linkage
  modified_base 3: mod_base = gm
  modified_base 4: mod_base = OTHER; note = 2'-O-methyladenosine
  modified_base 5: mod_base = cm
  modified_base 6: mod_base = OTHER; note = 2'-O-methyladenosine
  modified_base 7: mod_base = um
  modified_base 8: mod_base = cm
  modified_base 9: mod_base = OTHER; note = 2'-fluorouridine
  modified_base 10: mod_base = OTHER; note = 2'-fluorouridine
  modified_base 11: mod_base = OTHER; note = 2'-fluoroguanosine
  modified_base 12: mod_base = um
  modified_base 13: mod_base = cm
  modified_base 14: mod_base = OTHER; note = 2'-O-methyladenosine
  modified_base 15: mod_base = OTHER; note = 2'-O-methyladenosine
  modified_base 16: mod_base = OTHER; note = 2'-O-methyladenosine
  modified_base 17: mod_base = OTHER; note = 2'-O-methyladenosine
  modified_base 18: mod_base = gm
  modified_base 19: mod_base = OTHER; note = 2'-O-methyluridine with a 3'-phosphorothioate linkage
  modified_base 20: mod_base = OTHER; note = 2'-O-methylcytidine with a 3'-phosphorothioate linkage
  modified_base 21: mod_base = OTHER; note = 2'-O-methyladenosine
aggacatcttgtcaaaagtca

SEQ ID NO: 1875 - RNA, 23 nt, synthetic construct
  source 1..23: mol_type = other RNA
  modified_base 1: mod_base = OTHER; note = 2'-O-methyluridine with a 3'-phosphorothioate linkage and a 5'-phosphate substitution
  modified_base 2: mod_base = OTHER; note = 2'-fluoroguanosine with a 3'-phosphorothioate linkage
  modified_base 3: mod_base = OTHER; note = 2'-O-methyladenosine
  modified_base 4: mod_base = cm
  modified_base 5: mod_base = OTHER; note = 2'-fluorouridine
  modified_base 6: mod_base = um
  modified_base 7: mod_base = OTHER; note = 2'-fluorouridine
  modified_base 8: mod_base = um
  modified_base 9: mod_base = gm
  modified_base 10: mod_base = OTHER; note = 2'-O-methyladenosine
  modified_base 11: mod_base = cm
  modified_base 12: mod_base = OTHER; note = 2'-O-methyladenosine
  modified_base 13: mod_base = OTHER; note = 2'-O-methyladenosine
  modified_base 14: mod_base = OTHER; note = 2'-fluoroguanosine
  modified_base 15: mod_base = OTHER; note = 2'-O-methyladenosine
  modified_base 16: mod_base = OTHER; note = 2'-fluorouridine
  modified_base 17: mod_base = gm
  modified_base 18: mod_base = um
  modified_base 19: mod_base = cm
  modified_base 20: mod_base = cm
  modified_base 21: mod_base = OTHER; note = 2'-O-methyluridine with a 3'-phosphorothioate linkage
  modified_base 22: mod_base = OTHER; note = 2'-O-methylguanosine with a 3'-phosphorothioate linkage
  modified_base 23: mod_base = cm
tgacttttgacaagatgtcctgc

SEQ ID NO: 1876 - RNA, 21 nt, synthetic construct
  source 1..21: mol_type = other RNA
  modified_base 1: mod_base = OTHER; note = 2'-O-methylguanosine with a 3'-phosphorothioate linkage
  modified_base 2: mod_base = OTHER; note = 2'-O-methylguanosine with a 3'-phosphorothioate linkage
  modified_base 3: mod_base = OTHER; note = 2'-O-methyladenosine
  modified_base 4: mod_base = cm
  modified_base 5: mod_base = OTHER; note = 2'-O-methyladenosine
  modified_base 6: mod_base = um
  modified_base 7: mod_base = cm
  modified_base 8: mod_base = um
  modified_base 9: mod_base = OTHER; note = 2'-fluorouridine
  modified_base 10: mod_base = OTHER; note = 2'-fluoroguanosine
  modified_base 11: mod_base = OTHER; note = 2'-fluorouridine
  modified_base 12: mod_base = cm
  modified_base 13: mod_base = OTHER; note = 2'-O-methyladenosine
  modified_base 14: mod_base = OTHER; note = 2'-O-methyladenosine
  modified_base 15: mod_base = OTHER; note = 2'-O-methyladenosine
  modified_base 16: mod_base = OTHER; note = 2'-O-methyladenosine
  modified_base 17: mod_base = gm
  modified_base 18: mod_base = um
  modified_base 19: mod_base = OTHER; note = 2'-O-methylcytidine with a 3'-phosphorothioate linkage
  modified_base 20: mod_base = OTHER; note = 2'-O-methyladenosine with a 3'-phosphorothioate linkage
  modified_base 21: mod_base = OTHER; note = 2'-O-methyladenosine
ggacatcttgtcaaaagtcaa

SEQ ID NO: 1877 - RNA, 23 nt, synthetic construct
  source 1..23: mol_type = other RNA
  modified_base 1: mod_base = OTHER; note = 2'-O-methyluridine with a 3'-phosphorothioate linkage and a 5'-phosphate substitution
  modified_base 2: mod_base = OTHER; note = 2'-fluorouridine with a 3'-phosphorothioate linkage
  modified_base 3: mod_base = gm
  modified_base 4: mod_base = OTHER; note = 2'-O-methyladenosine
  modified_base 5: mod_base = OTHER; note = 2'-fluorocytidine
  modified_base 6: mod_base = um
  modified_base 7: mod_base = OTHER; note = 2'-fluorouridine
  modified_base 8: mod_base = um
  modified_base 9: mod_base = um
  modified_base 10: mod_base = gm
  modified_base 11: mod_base = OTHER; note = 2'-O-methyladenosine
  modified_base 12: mod_base = cm
  modified_base 13: mod_base = OTHER; note = 2'-O-methyladenosine
  modified_base 14: mod_base = OTHER; note = 2'-fluoroadenosine
  modified_base 15: mod_base = gm
  modified_base 16: mod_base = OTHER; note = 2'-fluoroadenosine
  modified_base 17: mod_base = um
  modified_base 18: mod_base = gm
  modified_base 19: mod_base = um
  modified_base 20: mod_base = cm
  modified_base 21: mod_base = OTHER; note = 2'-O-methylcytidine with a 3'-phosphorothioate linkage
  modified_base 22: mod_base = OTHER; note = 2'-O-methyluridine with a 3'-phosphorothioate linkage
  modified_base 23: mod_base = gm
ttgacttttgacaagatgtcctg

SEQ ID NO: 1878 - RNA, 21 nt, synthetic construct
  source 1..21: mol_type = other RNA
  modified_base 1: mod_base = OTHER; note = 2'-O-methyluridine with a 3'-phosphorothioate linkage
  modified_base 2: mod_base = OTHER; note = 2'-O-methyladenosine with a 3'-phosphorothioate linkage
  modified_base 3: mod_base = OTHER; note = 2'-O-methyladenosine
  modified_base 4: mod_base = gm
  modified_base 5: mod_base = um
  modified_base 6: mod_base = cm
  modified_base 7: mod_base = um
  modified_base 8: mod_base = gm
  modified_base 9: mod_base = OTHER; note = 2'-fluoroguanosine
  modified_base 10: mod_base = OTHER; note = 2'-fluoroguanosine
  modified_base 11: mod_base = OTHER; note = 2'-fluoroadenosine
  modified_base 12: mod_base = um
  modified_base 13: mod_base = gm
  modified_base 14: mod_base = um
  modified_base 15: mod_base = OTHER; note = 2'-O-methyladenosine
  modified_base 16: mod_base = gm
  modified_base 17: mod_base = OTHER; note = 2'-O-methyladenosine
  modified_base 18: mod_base = OTHER; note = 2'-O-methyladenosine
  modified_base 19: mod_base = OTHER; note = 2'-O-methylcytidine with a 3'-phosphorothioate linkage
  modified_base 20: mod_base = OTHER; note = 2'-O-methyluridine with a 3'-phosphorothioate linkage
  modified_base 21: mod_base = OTHER; note = 2'-O-methyladenosine
taagtctgggatgtagaacta

SEQ ID NO: 1879 - RNA, 23 nt, synthetic construct
  source 1..23: mol_type = other RNA
  modified_base 1: mod_base = OTHER; note = 2'-O-methyluridine with a 3'-phosphorothioate linkage and a 5'-phosphate substitution
  modified_base 2: mod_base = OTHER; note = 2'-fluoroadenosine with a 3'-phosphorothioate linkage
  modified_base 3: mod_base = gm
  modified_base 4: mod_base = um
  modified_base 5: mod_base = OTHER; note = 2'-fluorouridine
  modified_base 6: mod_base = cm
  modified_base 7: mod_base = OTHER; note = 2'-fluorouridine
  modified_base 8: mod_base = OTHER; note = 2'-O-methyladenosine
  modified_base 9: mod_base = cm
  modified_base 10: mod_base = OTHER; note = 2'-O-methyladenosine
  modified_base 11: mod_base = um
  modified_base 12: mod_base = cm
  modified_base 13: mod_base = cm
  modified_base 14: mod_base = OTHER; note = 2'-fluorocytidine
  modified_base 15: mod_base = OTHER; note = 2'-O-methyladenosine
  modified_base 16: mod_base = OTHER; note = 2'-fluoroguanosine
  modified_base 17: mod_base = OTHER; note = 2'-O-methyladenosine
  modified_base 18: mod_base = cm
  modified_base 19: mod_base = um
  modified_base 20: mod_base = um
  modified_base 21: mod_base = OTHER; note = 2'-O-methyladenosine with a 3'-phosphorothioate linkage
  modified_base 22: mod_base = OTHER; note = 2'-O-methyladenosine with a 3'-phosphorothioate linkage
  modified_base 23: mod_base = um
tagttctacatcccagacttaat

SEQ ID NO: 1880 - RNA, 21 nt, synthetic construct
  source 1..21: mol_type = other RNA
  modified_base 1: mod_base = OTHER; note = 2'-O-methylguanosine with a 3'-phosphorothioate linkage
  modified_base 2: mod_base = OTHER; note = 2'-O-methylcytidine with a 3'-phosphorothioate linkage
  modified_base 3: mod_base = um
  modified_base 4: mod_base = OTHER; note = 2'-O-methyladenosine
  modified_base 5: mod_base = um
  modified_base 6: mod_base = um
  modified_base 7: mod_base = um
  modified_base 8: mod_base = gm
  modified_base 9: mod_base = OTHER; note = 2'-fluorouridine
  modified_base 10: mod_base = OTHER; note = 2'-fluorouridine
  modified_base 11: mod_base = OTHER; note = 2'-fluorocytidine
  modified_base 12: mod_base = OTHER; note = 2'-O-methyladenosine
  modified_base 13: mod_base = gm
  modified_base 14: mod_base = OTHER; note = 2'-O-methyladenosine
  modified_base 15: mod_base = gm
  modified_base 16: mod_base = OTHER; note = 2'-O-methyladenosine
  modified_base 17: mod_base = gm
  modified_base 18: mod_base = gm
  modified_base 19: mod_base = OTHER; note = 2'-O-methylcytidine with a 3'-phosphorothioate linkage
  modified_base 20: mod_base = OTHER; note = 2'-O-methylcytidine with a 3'-phosphorothioate linkage
  modified_base 21: mod_base = OTHER; note = 2'-O-methyladenosine
gctatttgttcagagaggcca

SEQ ID NO: 1881 - RNA, 23 nt, synthetic construct
  source 1..23: mol_type = other RNA
  modified_base 1: mod_base = OTHER; note = 2'-O-methyluridine with a 3'-phosphorothioate linkage and a 5'-phosphate substitution
  modified_base 2: mod_base = OTHER; note = 2'-fluoroguanosine with a 3'-phosphorothioate linkage
  modified_base 3: mod_base = gm
  modified_base 4: mod_base = cm
  modified_base 5: mod_base = OTHER; note = 2'-fluorocytidine
  modified_base 6: mod_base = um
  modified_base 7: mod_base = OTHER; note = 2'-fluorocytidine
  modified_base 8: mod_base = um
  modified_base 9: mod_base = cm
  modified_base 10: mod_base = um
  modified_base 11: mod_base = gm
  modified_base 12: mod_base = OTHER; note = 2'-O-methyladenosine
  modified_base 13: mod_base = OTHER; note = 2'-O-methyladenosine
  modified_base 14: mod_base = OTHER; note = 2'-fluorocytidine
  modified_base 15: mod_base = OTHER; note = 2'-O-methyladenosine
  modified_base 16: mod_base = OTHER; note = 2'-fluoroadenosine
  modified_base 17: mod_base = OTHER; note = 2'-O-methyladenosine
  modified_base 18: mod_base = um
  modified_base 19: mod_base = OTHER; note = 2'-O-methyladenosine
  modified_base 20: mod_base = gm
  modified_base 21: mod_base = OTHER; note = 2'-O-methylcytidine with a 3'-phosphorothioate linkage
  modified_base 22: mod_base = OTHER; note = 2'-O-methylcytidine with a 3'-phosphorothioate linkage
  modified_base 23: mod_base = um
tggcctctctgaacaaatagcct

SEQ ID NO: 1882 - RNA, 21 nt, synthetic construct
  source 1..21: mol_type = other RNA
  modified_base 1: mod_base = OTHER; note = 2'-O-methylcytidine with a 3'-phosphorothioate linkage
  modified_base 2: mod_base = OTHER; note = 2'-O-methyluridine with a 3'-phosphorothioate linkage
  modified_base 3: mod_base = OTHER; note = 2'-O-methyladenosine
  modified_base 4: mod_base = um
  modified_base 5: mod_base = um
  modified_base 6: mod_base = um
  modified_base 7: mod_base = gm
  modified_base 8: mod_base = um
  modified_base 9: mod_base = OTHER; note = 2'-fluorouridine
  modified_base 10: mod_base = OTHER; note = 2'-fluorocytidine
  modified_base 11: mod_base = OTHER; note = 2'-fluoroadenosine
  modified_base 12: mod_base = gm
  modified_base 13: mod_base = OTHER; note = 2'-O-methyladenosine
  modified_base 14: mod_base = gm
  modified_base 15: mod_base = OTHER; note = 2'-O-methyladenosine
  modified_base 16: mod_base = gm
  modified_base 17: mod_base = gm
  modified_base 18: mod_base = cm
  modified_base 19: mod_base = OTHER; note = 2'-O-methylcytidine with a 3'-phosphorothioate linkage
  modified_base 20: mod_base = OTHER; note = 2'-O-methyluridine with a 3'-phosphorothioate linkage
  modified_base 21: mod_base = OTHER; note = 2'-O-methyladenosine
ctatttgttcagagaggccta

SEQ ID NO: 1883 - RNA, 23 nt, synthetic construct
  source 1..23: mol_type = other RNA
  modified_base 1: mod_base = OTHER; note = 2'-O-methyluridine with a 3'-phosphorothioate linkage and a 5'-phosphate substitution
  modified_base 2: mod_base = OTHER; note = 2'-fluoroadenosine with a 3'-phosphorothioate linkage
  modified_base 3: mod_base = gm
  modified_base 4: mod_base = gm
  modified_base 5: mod_base = OTHER; note = 2'-fluorocytidine
  modified_base 6: mod_base = cm
  modified_base 7: mod_base = OTHER; note = 2'-fluorouridine
  modified_base 8: mod_base = cm
  modified_base 9: mod_base = um
  modified_base 10: mod_base = cm
  modified_base 11: mod_base = um
  modified_base 12: mod_base = gm
  modified_base 13: mod_base = OTHER; note = 2'-O-methyladenosine
  modified_base 14: mod_base = OTHER; note = 2'-fluoroadenosine
  modified_base 15: mod_base = cm
  modified_base 16: mod_base = OTHER; note = 2'-fluoroadenosine
  modified_base 17: mod_base = OTHER; note = 2'-O-methyladenosine
  modified_base 18: mod_base = OTHER; note = 2'-O-methyladenosine
  modified_base 19: mod_base = um
  modified_base 20: mod_base = OTHER; note = 2'-O-methyladenosine
  modified_base 21: mod_base = OTHER; note = 2'-O-methylguanosine with a 3'-phosphorothioate linkage
  modified_base 22: mod_base = OTHER; note = 2'-O-methylcytidine with a 3'-phosphorothioate linkage
  modified_base 23: mod_base = cm
taggcctctctgaacaaatagcc

SEQ ID NO: 1884 - RNA, 21 nt, synthetic construct
  source 1..21: mol_type = other RNA
  modified_base 1: mod_base = OTHER; note = 2'-O-methyluridine with a 3'-phosphorothioate linkage
  modified_base 2: mod_base = OTHER; note = 2'-O-methyluridine with a 3'-phosphorothioate linkage
  modified_base 3: mod_base = gm
  modified_base 4: mod_base = gm
  modified_base 5: mod_base = OTHER; note = 2'-O-methyladenosine
  modified_base 6: mod_base = OTHER; note = 2'-O-methyladenosine
  modified_base 7: mod_base = gm
  modified_base 8: mod_base = um
  modified_base 9: mod_base = OTHER; note = 2'-fluoroguanosine
  modified_base 10: mod_base = OTHER; note = 2'-fluorouridine
  modified_base 11: mod_base = OTHER; note = 2'-fluorouridine
  modified_base 12: mod_base = cm
  modified_base 13: mod_base = OTHER; note = 2'-O-methyladenosine
  modified_base 14: mod_base = OTHER; note = 2'-O-methyladenosine
  modified_base 15: mod_base = gm
  modified_base 16: mod_base = OTHER; note = 2'-O-methyladenosine
  modified_base 17: mod_base = OTHER; note = 2'-O-methyladenosine
  modified_base 18: mod_base = OTHER; note = 2'-O-methyladenosine
  modified_base 19: mod_base = OTHER; note = 2'-O-methyluridine with a 3'-phosphorothioate linkage
  modified_base 20: mod_base = OTHER; note = 2'-O-methyladenosine with a 3'-phosphorothioate linkage
  modified_base 21: mod_base = OTHER; note = 2'-O-methyladenosine
ttggaagtgttcaagaaataa

SEQ ID NO: 1885 - RNA, 23 nt, synthetic construct
  source 1..23: mol_type = other RNA
  modified_base 1: mod_base = OTHER; note = 2'-O-methyluridine with a 3'-phosphorothioate linkage and a 5'-phosphate substitution
  modified_base 2: mod_base = OTHER; note = 2'-fluorouridine with a 3'-phosphorothioate linkage
  modified_base 3: mod_base = OTHER; note = 2'-O-methyladenosine
  modified_base 4: mod_base = um
  modified_base 5: mod_base = OTHER; note = 2'-fluorouridine
  modified_base 6: mod_base = um
  modified_base 7: mod_base = OTHER; note = 2'-fluorocytidine
  modified_base 8: mod_base = um
  modified_base 9: mod_base = um
  modified_base 10: mod_base = gm
  modified_base 11: mod_base = OTHER; note = 2'-O-methyladenosine
  modified_base 12: mod_base = OTHER; note = 2'-O-methyladenosine
  modified_base 13: mod_base = cm
  modified_base 14: mod_base = OTHER; note = 2'-fluoroadenosine
  modified_base 15: mod_base = cm
  modified_base 16: mod_base = OTHER; note = 2'-fluorouridine
  modified_base 17: mod_base = um
  modified_base 18: mod_base = cm
  modified_base 19: mod_base = cm
  modified_base 20: mod_base = OTHER; note = 2'-O-methyladenosine
  modified_base 21: mod_base = OTHER; note = 2'-O-methyladenosine with a 3'-phosphorothioate linkage
  modified_base 22: mod_base = OTHER; note = 2'-O-methyluridine with a 3'-phosphorothioate linkage
  modified_base 23: mod_base = OTHER; note = 2'-O-methyladenosine
ttatttcttgaacacttccaata

SEQ ID NO: 1886 - RNA, 21 nt, synthetic construct
  source 1..21: mol_type = other RNA
  modified_base 1: mod_base = OTHER; note = 2'-O-methyluridine with a 3'-phosphorothioate linkage
  modified_base 2: mod_base = OTHER; note = 2'-O-methylguanosine with a 3'-phosphorothioate linkage
  modified_base 3: mod_base = gm
  modified_base 4: mod_base = OTHER; note = 2'-O-methyladenosine
  modified_base 5: mod_base = OTHER; note = 2'-O-methyladenosine
  modified_base 6: mod_base = gm
  modified_base 7: mod_base = um
  modified_base 8: mod_base = gm
  modified_base 9: mod_base = OTHER; note = 2'-fluorouridine
  modified_base 10: mod_base = OTHER; note = 2'-fluorouridine
  modified_base 11: mod_base = OTHER; note = 2'-fluorocytidine
  modified_base 12: mod_base = OTHER; note = 2'-O-methyladenosine
  modified_base 13: mod_base = OTHER; note = 2'-O-methyladenosine
  modified_base 14: mod_base = gm
  modified_base 15: mod_base = OTHER; note = 2'-O-methyladenosine
  modified_base 16: mod_base = OTHER; note = 2'-O-methyladenosine
  modified_base 17: mod_base = OTHER; note = 2'-O-methyladenosine
  modified_base 18: mod_base = um
  modified_base 19: mod_base = OTHER; note = 2'-O-methyladenosine with a 3'-phosphorothioate linkage
  modified_base 20: mod_base = OTHER; note = 2'-O-methyladenosine with a 3'-phosphorothioate linkage
  modified_base 21: mod_base = OTHER; note = 2'-O-methyladenosine
tggaagtgttcaagaaataaa

SEQ ID NO: 1887 - RNA, 23 nt, synthetic construct
  source 1..23: mol_type = other RNA
  modified_base 1: mod_base = OTHER; note = 2'-O-methyluridine with a 3'-phosphorothioate linkage and a 5'-phosphate substitution
  modified_base 2: mod_base = OTHER; note = 2'-fluorouridine with a 3'-phosphorothioate linkage
  modified_base 3: mod_base = um
  modified_base 4: mod_base = OTHER; note = 2'-O-methyladenosine
  modified_base 5: mod_base = OTHER; note = 2'-fluorouridine
  modified_base 6: mod_base = um
  modified_base 7: mod_base = OTHER; note = 2'-fluorouridine
  modified_base 8: mod_base = cm
  modified_base 9: mod_base = um
  modified_base 10: mod_base = um
  modified_base 11: mod_base = gm
  modified_base 12: mod_base = OTHER; note = 2'-O-methyladenosine
  modified_base 13: mod_base = OTHER; note = 2'-O-methyladenosine
  modified_base 14: mod_base = OTHER; note = 2'-fluorocytidine
  modified_base 15: mod_base = OTHER; note = 2'-O-methyladenosine
  modified_base 16: mod_base = OTHER; note = 2'-fluorocytidine
  modified_base 17: mod_base = um
  modified_base 18: mod_base = um
  modified_base 19: mod_base = cm
  modified_base 20: mod_base = cm
  modified_base 21: mod_base = OTHER; note = 2'-O-methyladenosine with a 3'-phosphorothioate linkage
  modified_base 22: mod_base = OTHER; note = 2'-O-methyladenosine with a 3'-phosphorothioate linkage
  modified_base 23: mod_base = um
tttatttcttgaacacttccaat

SEQ ID NO: 1888 - RNA, 21 nt, synthetic construct
  source 1..21: mol_type = other RNA
  modified_base 1: mod_base = OTHER; note = 2'-O-methyluridine with a 3'-phosphorothioate linkage
  modified_base 2: mod_base = OTHER; note = 2'-O-methylguanosine with a 3'-phosphorothioate linkage
  modified_base 3: mod_base = um
  modified_base 4: mod_base = OTHER; note = 2'-O-methyladenosine
  modified_base 5: mod_base = cm
  modified_base 6: mod_base = um
  modified_base 7: mod_base = gm
  modified_base 8: mod_base = OTHER; note = 2'-O-methyladenosine
  modified_base 9: mod_base = OTHER; note = 2'-fluorouridine
  modified_base 10: mod_base = OTHER; note = 2'-fluoroadenosine
  modified_base 11: mod_base = OTHER; note = 2'-fluoroadenosine
  modified_base 12: mod_base = OTHER; note = 2'-O-methyladenosine
  modified_base 13: mod_base = OTHER; note = 2'-O-methyladenosine
  modified_base 14: mod_base = um
  modified_base 15: mod_base = OTHER; note = 2'-O-methyladenosine
  modified_base 16: mod_base = cm
  modified_base 17: mod_base = um
  modified_base 18: mod_base = cm
  modified_base 19: mod_base = OTHER; note = 2'-O-methyluridine with a 3'-phosphorothioate linkage
  modified_base 20: mod_base = OTHER; note = 2'-O-methyladenosine with a 3'-phosphorothioate linkage
  modified_base 21: mod_base = OTHER; note = 2'-O-methyladenosine
tgtactgataaaatactctaa

SEQ ID NO: 1889 - RNA, 23 nt, synthetic construct
  source 1..23: mol_type = other RNA
  modified_base 1: mod_base = OTHER; note = 2'-O-methyluridine with a 3'-phosphorothioate linkage and a 5'-phosphate substitution
  modified_base 2: mod_base = OTHER; note = 2'-fluorouridine with a 3'-phosphorothioate linkage
  modified_base 3: mod_base = OTHER; note = 2'-O-methyladenosine
  modified_base 4: mod_base = gm
  modified_base 5: mod_base = OTHER; note = 2'-fluoroadenosine
  modified_base 6: mod_base = gm
  modified_base 7: mod_base = OTHER; note = 2'-fluorouridine
  modified_base 8: mod_base = OTHER; note = 2'-O-methyladenosine
  modified_base 9: mod_base = um
  modified_base 10: mod_base = um
  modified_base 11: mod_base = um
  modified_base 12: mod_base = um
  modified_base 13: mod_base = OTHER; note = 2'-O-methyladenosine
  modified_base 14: mod_base = OTHER; note = 2'-fluorouridine
  modified_base 15: mod_base = cm
  modified_base 16: mod_base = OTHER; note = 2'-fluoroadenosine
  modified_base 17: mod_base = gm
  modified_base 18: mod_base = um
  modified_base 19: mod_base = OTHER; note = 2'-O-methyladenosine
  modified_base 20: mod_base = cm
  modified_base 21: mod_base = OTHER; note = 2'-O-methyladenosine with a 3'-phosphorothioate linkage
  modified_base 22: mod_base = OTHER; note = 2'-O-methylcytidine with a 3'-phosphorothioate linkage
  modified_base 23: mod_base = OTHER; note = 2'-O-methyladenosine
ttagagtattttatcagtacaca

SEQ ID NO: 1890 - RNA, 21 nt, synthetic construct
  source 1..21: mol_type = other RNA
  modified_base 1: mod_base = OTHER; note = 2'-O-methyladenosine with a 3'-phosphorothioate linkage
  modified_base 2: mod_base = OTHER; note = 2'-O-methylguanosine with a 3'-phosphorothioate linkage
  modified_base 3: mod_base = gm
  modified_base 4: mod_base = OTHER; note = 2'-O-methyladenosine
  modified_base 5: mod_base = OTHER; note = 2'-O-methyladenosine
  modified_base 6: mod_base = OTHER; note = 2'-O-methyladenosine
  modified_base 7: mod_base = cm
  modified_base 8: mod_base = cm
  modified_base 9: mod_base = OTHER; note = 2'-fluorocytidine
  modified_base 10: mod_base = OTHER; note = 2'-fluorouridine
  modified_base 11: mod_base = OTHER; note = 2'-fluoroguanosine
  modified_base 12: mod_base = gm
  modified_base 13: mod_base = cm
  modified_base 14: mod_base = um
  modified_base 15: mod_base = um
  modified_base 16: mod_base = gm
  modified_base 17: mod_base = cm
  modified_base 18: mod_base = um
  modified_base 19: mod_base = OTHER; note = 2'-O-methyluridine with a 3'-phosphorothioate linkage
  modified_base 20: mod_base = OTHER; note = 2'-O-methylguanosine with a 3'-phosphorothioate linkage
  modified_base 21: mod_base = OTHER; note = 2'-O-methyladenosine
aggaaaccctggcttgcttga

SEQ ID NO: 1891 - RNA, 23 nt, synthetic construct
  source 1..23: mol_type = other RNA
  modified_base 1: mod_base = OTHER; note = 2'-O-methyluridine with a 3'-phosphorothioate linkage and a 5'-phosphate substitution
  modified_base 2: mod_base = OTHER; note = 2'-fluorocytidine with a 3'-phosphorothioate linkage
  modified_base 3: mod_base = OTHER; note = 2'-O-methyladenosine
  modified_base 4: mod_base = OTHER; note = 2'-O-methyladenosine
  modified_base 5: mod_base = OTHER; note = 2'-fluoroguanosine
  modified_base 6: mod_base = cm
  modified_base 7: mod_base = OTHER; note = 2'-fluoroadenosine
  modified_base 8: mod_base = OTHER; note = 2'-O-methyladenosine
  modified_base 9: mod_base = gm
  modified_base 10: mod_base = cm
  modified_base 11: mod_base = cm
  modified_base 12: mod_base = OTHER; note = 2'-O-methyladenosine
  modified_base 13: mod_base = gm
  modified_base 14: mod_base = OTHER; note = 2'-fluoroguanosine
  modified_base 15: mod_base = gm
  modified_base 16: mod_base = OTHER; note = 2'-fluorouridine
  modified_base 17: mod_base = um
  modified_base 18: mod_base = um
  modified_base 19: mod_base = cm
  modified_base 20: mod_base = cm
  modified_base 21: mod_base = OTHER; note = 2'-O-methyluridine with a 3'-phosphorothioate linkage
  modified_base 22: mod_base = OTHER; note = 2'-O-methylguanosine with a 3'-phosphorothioate linkage
  modified_base 23: mod_base = gm
tcaagcaagccagggtttcctgg

SEQ ID NO: 1892 - RNA, 21 nt, synthetic construct
  source 1..21: mol_type = other RNA
  modified_base 1: mod_base = OTHER; note = 2'-O-methylguanosine with a 3'-phosphorothioate linkage
  modified_base 2: mod_base = OTHER; note = 2'-O-methyluridine with a 3'-phosphorothioate linkage
  modified_base 3: mod_base = gm
  modified_base 4: mod_base = cm
  modified_base 5: mod_base = cm
  modified_base 6: mod_base = um
  modified_base 7: mod_base = OTHER; note = 2'-O-methyladenosine
  modified_base 8: mod_base = gm
  modified_base 9: mod_base = OTHER; note = 2'-fluorouridine
  modified_base 10: mod_base = OTHER; note = 2'-fluorouridine
  modified_base 11: mod_base = OTHER; note = 2'-fluorocytidine
  modified_base 12: mod_base = cm
  modified_base 13: mod_base = um
  modified_base 14: mod_base = gm
  modified_base 15: mod_base = um
  modified_base 16: mod_base = gm
  modified_base 17: mod_base = gm
  modified_base 18: mod_base = cm
  modified_base 19: mod_base = OTHER; note = 2'-O-methylcytidine with a 3'-phosphorothioate linkage
  modified_base 20: mod_base = OTHER; note = 2'-O-methyladenosine with a 3'-phosphorothioate linkage
  modified_base 21: mod_base = OTHER; note = 2'-O-methyladenosine
gtgcctagttcctgtggccaa

SEQ ID NO: 1893 - RNA, 23 nt, synthetic construct
  source 1..23: mol_type = other RNA
  modified_base 1: mod_base = OTHER; note = 2'-O-methyluridine with a 3'-phosphorothioate linkage and a 5'-phosphate substitution
  modified_base 2: mod_base = OTHER; note = 2'-fluorouridine with a 3'-phosphorothioate linkage
  modified_base 3: mod_base = gm
  modified_base 4: mod_base = gm
  modified_base 5: mod_base = OTHER; note = 2'-fluorocytidine
  modified_base 6: mod_base = cm
  modified_base 7: mod_base = OTHER; note = 2'-fluoroadenosine
  modified_base 8: mod_base = cm
  modified_base 9: mod_base = OTHER; note = 2'-O-methyladenosine
  modified_base 10: mod_base = gm
  modified_base 11: mod_base = gm
  modified_base 12: mod_base = OTHER; note = 2'-O-methyladenosine
  modified_base 13: mod_base = OTHER; note = 2'-O-methyladenosine
  modified_base 14: mod_base = OTHER; note = 2'-fluorocytidine
  modified_base 15: mod_base = um
  modified_base 16: mod_base = OTHER; note = 2'-fluoroadenosine
  modified_base 17: mod_base = gm
  modified_base 18: mod_base = gm
  modified_base 19: mod_base = cm
  modified_base 20: mod_base = OTHER; note = 2'-O-methyladenosine
  modified_base 21: mod_base = OTHER; note = 2'-O-methylcytidine with a 3'-phosphorothioate linkage
  modified_base 22: mod_base = OTHER; note = 2'-O-methyladenosine with a 3'-phosphorothioate linkage
  modified_base 23: mod_base = gm
ttggccacaggaactaggcacag

SEQ ID NO: 1894 - RNA, 21 nt, synthetic construct
  source 1..21: mol_type = other RNA
  modified_base 1: mod_base = OTHER; note = 2'-O-methylguanosine with a 3'-phosphorothioate linkage
  modified_base 2: mod_base = OTHER; note = 2'-O-methyluridine with a 3'-phosphorothioate linkage
  modified_base 3: mod_base = um
  modified_base 4: mod_base = cm
  modified_base 5: mod_base = cm
  modified_base 6: mod_base = um
  modified_base 7: mod_base = gm
  modified_base 8: mod_base = um
  modified_base 9: mod_base = OTHER; note = 2'-fluoroguanosine
  modified_base 10: mod_base = OTHER; note = 2'-fluoroguanosine
  modified_base 11: mod_base = OTHER; note = 2'-fluorocytidine
  modified_base 12: mod_base = cm
  modified_base 13: mod_base = OTHER; note = 2'-O-methyladenosine
  modified_base 14: mod_base = gm
  modified_base 15: mod_base = gm
  modified_base 16: mod_base = OTHER; note = 2'-O-methyladenosine
  modified_base 17: mod_base = gm
  modified_base 18: mod_base = gm
  modified_base 19: mod_base = OTHER; note = 2'-O-methyluridine with a 3'-phosphorothioate linkage
  modified_base 20: mod_base = OTHER; note = 2'-O-methyluridine with a 3'-phosphorothioate linkage
  modified_base 21: mod_base = OTHER; note = 2'-O-methyladenosine
gttcctgtggccaggaggtta

SEQ ID NO: 1895 - RNA, 23 nt, synthetic construct
  source 1..23: mol_type = other RNA
  modified_base 1: mod_base = OTHER; note = 2'-O-methyluridine with a 3'-phosphorothioate linkage and a 5'-phosphate substitution
  modified_base 2: mod_base = OTHER; note = 2'-fluoroadenosine with a 3'-phosphorothioate linkage
  modified_base 3: mod_base = OTHER; note = 2'-O-methyladenosine
  modified_base 4: mod_base = cm
  modified_base 5: mod_base = OTHER; note = 2'-fluorocytidine
  modified_base 6: mod_base = um
  modified_base 7: mod_base = OTHER; note = 2'-fluorocytidine
  modified_base 8: mod_base = cm
  modified_base 9: mod_base = um
  modified_base 10: mod_base = gm
  modified_base 11: mod_base = gm
  modified_base 12: mod_base = cm
  modified_base 13: mod_base = cm
  modified_base 14: mod_base = OTHER; note = 2'-fluoroadenosine
  modified_base 15: mod_base = cm
  modified_base 16: mod_base = OTHER; note = 2'-fluoroadenosine
  modified_base 17: mod_base = gm
  modified_base 18: mod_base = gm
  modified_base 19: mod_base = OTHER; note = 2'-O-methyladenosine
  modified_base 20: mod_base = OTHER; note = 2'-O-methyladenosine
  modified_base 21: mod_base = OTHER; note = 2'-O-methylcytidine with a 3'-phosphorothioate linkage
  modified_base 22: mod_base = OTHER; note = 2'-O-methyluridine with a 3'-phosphorothioate linkage
  modified_base 23: mod_base = OTHER; note = 2'-O-methyladenosine
taacctcctggccacaggaacta

SEQ ID NO: 1896 - RNA, 21 nt, synthetic construct
  source 1..21: mol_type = other RNA
  modified_base 1: mod_base = OTHER; note = 2'-O-methylcytidine with a 3'-phosphorothioate linkage
  modified_base 2: mod_base = OTHER; note = 2'-O-methyluridine with a 3'-phosphorothioate linkage
  modified_base 3: mod_base = gm
  modified_base 4: mod_base = um
  modified_base 5: mod_base = gm
  modified_base 6: mod_base = gm
  modified_base 7: mod_base = cm
  modified_base 8: mod_base = cm
  modified_base 9: mod_base = OTHER; note = 2'-fluoroadenosine
  modified_base 10: mod_base = OTHER; note = 2'-fluoroguanosine
  modified_base 11: mod_base = OTHER; note = 2'-fluoroguanosine
  modified_base 12: mod_base = OTHER; note = 2'-O-methyladenosine
  modified_base 13: mod_base = gm
  modified_base 14: mod_base = gm
  modified_base 15: mod_base = um
  modified_base 16: mod_base = um
  modified_base 17: mod_base = gm
  modified_base 18: mod_base = gm
  modified_base 19: mod_base = OTHER; note = 2'-O-methyluridine with a 3'-phosphorothioate linkage
  modified_base 20: mod_base = OTHER; note = 2'-O-methylguanosine with a 3'-phosphorothioate linkage
  modified_base 21: mod_base = OTHER; note = 2'-O-methyladenosine
ctgtggccaggaggttggtga

SEQ ID NO: 1897 - RNA, 23 nt, synthetic construct
  source 1..23: mol_type = other RNA
  modified_base 1: mod_base = OTHER; note = 2'-O-methyluridine with a 3'-phosphorothioate linkage and a 5'-phosphate substitution
  modified_base 2: mod_base = OTHER; note = 2'-fluorocytidine with a 3'-phosphorothioate linkage
  modified_base 3: mod_base = OTHER; note = 2'-O-methyladenosine
  modified_base 4: mod_base = cm
  modified_base 5: mod_base = OTHER; note = 2'-fluorocytidine
  modified_base 6: mod_base = OTHER; note = 2'-O-methyladenosine
  modified_base 7: mod_base = OTHER; note = 2'-fluoroadenosine
  modified_base 8: mod_base = cm
  modified_base 9: mod_base = cm
  modified_base 10: mod_base = um
  modified_base 11: mod_base = cm
  modified_base 12: mod_base = cm
  modified_base 13: mod_base = um
  modified_base 14: mod_base = OTHER; note = 2'-fluoroguanosine
  modified_base 15: mod_base = gm
  modified_base 16: mod_base = OTHER; note = 2'-fluorocytidine
  modified_base 17: mod_base = cm
  modified_base 18: mod_base = OTHER; note = 2'-O-methyladenosine
  modified_base 19: mod_base = cm
  modified_base 20: mod_base = OTHER; note = 2'-O-methyladenosine
  modified_base 21: mod_base = OTHER; note = 2'-O-methylguanosine with a 3'-phosphorothioate linkage
  modified_base 22: mod_base = OTHER; note = 2'-O-methylguanosine with a 3'-phosphorothioate linkage
  modified_base 23: mod_base = OTHER; note = 2'-O-methyladenosine
tcaccaacctcctggccacagga

SEQ ID NO: 1898 - RNA, 21 nt, synthetic construct
  source 1..21: mol_type = other RNA
  modified_base 1: mod_base = OTHER; note = 2'-O-methylguanosine with a 3'-phosphorothioate linkage
  modified_base 2: mod_base = OTHER; note = 2'-O-methylcytidine with a 3'-phosphorothioate linkage
  modified_base 3: mod_base = cm
  modified_base 4: mod_base = OTHER; note = 2'-O-methyladenosine
  modified_base 5: mod_base = gm
  modified_base 6: mod_base = gm
  modified_base 7: mod_base = OTHER; note = 2'-O-methyladenosine
  modified_base 8: mod_base = gm
  modified_base 9: mod_base = OTHER; note = 2'-fluoroguanosine
  modified_base 10: mod_base = OTHER; note = 2'-fluorouridine
  modified_base 11: mod_base = OTHER; note = 2'-fluorouridine
  modified_base 12: mod_base = gm
  modified_base 13: mod_base = gm
  modified_base 14: mod_base = um
  modified_base 15: mod_base = gm
  modified_base 16: mod_base = OTHER; note = 2'-O-methyladenosine
  modified_base 17: mod_base = cm
  modified_base 18: mod_base = um
  modified_base 19: mod_base = OTHER; note = 2'-O-methylguanosine with a 3'-phosphorothioate linkage
  modified_base 20: mod_base = OTHER; note = 2'-O-methyladenosine with a 3'-phosphorothioate linkage
  modified_base 21: mod_base = OTHER; note = 2'-O-methyladenosine
gccaggaggttggtgactgaa

SEQ ID NO: 1899 - RNA, 23 nt, synthetic construct
  source 1..23: mol_type = other RNA
  modified_base 1: mod_base = OTHER; note = 2'-O-methyluridine with a 3'-phosphorothioate linkage and a 5'-phosphate substitution
  modified_base 2: mod_base = OTHER; note = 2'-fluorouridine with a 3'-phosphorothioate linkage
  modified_base 3: mod_base = cm
  modified_base 4: mod_base = OTHER; note = 2'-O-methyladenosine
  modified_base 5: mod_base = OTHER; note = 2'-fluoroguanosine
  modified_base 6: mod_base = um
  modified_base 7: mod_base = OTHER; note = 2'-fluorocytidine
  modified_base 8: mod_base = OTHER; note = 2'-O-methyladenosine
  modified_base 9: mod_base = cm
  modified_base 10: mod_base = cm
  modified_base 11: mod_base = OTHER; note = 2'-O-methyladenosine
  modified_base 12: mod_base = OTHER; note = 2'-O-methyladenosine
  modified_base 13: mod_base = cm
  modified_base 14: mod_base = OTHER; note = 2'-fluorocytidine
  modified_base 15: mod_base = um
  modified_base 16: mod_base = OTHER; note = 2'-fluorocytidine
  modified_base 17: mod_base = cm
  modified_base 18: mod_base = um
  modified_base 19: mod_base = gm
  modified_base 20: mod_base = gm
  modified_base 21: mod_base = OTHER; note = 2'-O-methylcytidine with a 3'-phosphorothioate linkage
  modified_base 22: mod_base = OTHER; note = 2'-O-methylcytidine with a 3'-phosphorothioate linkage
  modified_base 23: mod_base = OTHER; note = 2'-O-methyladenosine
ttcagtcaccaacctcctggcca

SEQ ID NO: 1900 - RNA, 21 nt, synthetic construct
  source 1..21: mol_type = other RNA
  modified_base 1: mod_base = OTHER; note = 2'-O-methylcytidine with a 3'-phosphorothioate linkage
  modified_base 2: mod_base = OTHER; note = 2'-O-methyladenosine with a 3'-phosphorothioate linkage
  modified_base 3: mod_base = gm
  modified_base 4: mod_base = OTHER; note = 2'-O-methyladenosine
  modified_base 5: mod_base = gm
  modified_base 6: mod_base = um
  modified_base 7: mod_base = um
  modified_base 8: mod_base = OTHER; note = 2'-O-methyladenosine
  modified_base 9: mod_base = OTHER; note = 2'-fluorouridine
  modified_base 10: mod_base = OTHER; note = 2'-fluorouridine
  modified_base 11: mod_base = OTHER; note = 2'-fluoroguanosine
  modified_base 12: mod_base = OTHER; note = 2'-O-methyladenosine
  modified_base 13: mod_base = OTHER; note = 2'-O-methyladenosine
  modified_base 14: mod_base = um
  modified_base 15: mod_base = cm
  modified_base 16: mod_base = um
  modified_base 17: mod_base = um
  modified_base 18: mod_base = OTHER; note = 2'-O-methyladenosine
  modified_base 19: mod_base = OTHER; note = 2'-O-methyladenosine with a 3'-phosphorothioate linkage
  modified_base 20: mod_base = OTHER; note = 2'-O-methyluridine with a 3'-phosphorothioate linkage
  modified_base 21: mod_base = OTHER; note = 2'-O-methyladenosine
cagagttattgaatcttaata

SEQ ID NO: 1901 - RNA, 23 nt, synthetic construct
  source 1..23: mol_type = other RNA
  modified_base 1: mod_base = OTHER; note = 2'-O-methyluridine with a 3'-phosphorothioate linkage and a 5'-phosphate substitution
  modified_base 2: mod_base = OTHER; note = 2'-fluoroadenosine with a 3'-phosphorothioate linkage
  modified_base 3: mod_base = um
  modified_base 4: mod_base = um
  modified_base 5: mod_base = OTHER; note = 2'-fluoroadenosine
  modified_base 6: mod_base = OTHER; note = 2'-O-methyladenosine
  modified_base 7: mod_base = OTHER; note = 2'-fluoroguanosine
  modified_base 8: mod_base = OTHER; note = 2'-O-methyladenosine
  modified_base 9: mod_base = um
  modified_base 10: mod_base = um
  modified_base 11: mod_base = cm
  modified_base 12: mod_base = OTHER; note = 2'-O-methyladenosine
  modified_base 13: mod_base = OTHER; note = 2'-O-methyladenosine
  modified_base 14: mod_base = OTHER; note = 2'-fluorouridine
  modified_base 15: mod_base = OTHER; note = 2'-O-methyladenosine
  modified_base 16: mod_base = OTHER; note = 2'-fluoroadenosine
  modified_base 17: mod_base = cm
  modified_base 18: mod_base = um
  modified_base 19: mod_base = cm
  modified_base 20: mod_base = um
  modified_base 21: mod_base = OTHER; note = 2'-O-methylguanosine with a 3'-phosphorothioate linkage
  modified_base 22: mod_base = OTHER; note = 2'-O-methylcytidine with a 3'-phosphorothioate linkage
  modified_base 23: mod_base = um
tattaagattcaataactctgct

SEQ ID NO: 1902 - RNA, 21 nt, synthetic construct
  source 1..21: mol_type = other RNA
  modified_base 1: mod_base = OTHER; note = 2'-O-methyladenosine with a 3'-phosphorothioate linkage
  modified_base 2: mod_base = OTHER; note = 2'-O-methylguanosine with a 3'-phosphorothioate linkage
  modified_base 3: mod_base = OTHER; note = 2'-O-methyladenosine
  modified_base 4: mod_base = gm
  modified_base 5: mod_base = um
  modified_base 6: mod_base = um
  modified_base 7: mod_base = OTHER; note = 2'-O-methyladenosine
  modified_base 8: mod_base = um
  modified_base 9: mod_base = OTHER; note = 2'-fluorouridine
  modified_base 10: mod_base = OTHER; note = 2'-fluoroguanosine
  modified_base 11: mod_base = OTHER; note = 2'-fluoroadenosine
  modified_base 12: mod_base = OTHER; note = 2'-O-methyladenosine
  modified_base 13: mod_base = um
  modified_base 14: mod_base = cm
  modified_base 15: mod_base = um
  modified_base 16: mod_base = um
  modified_base 17: mod_base = OTHER; note = 2'-O-methyladenosine
  modified_base 18: mod_base = OTHER; note = 2'-O-methyladenosine
  modified_base 19: mod_base = OTHER; note = 2'-O-methyluridine with a 3'-phosphorothioate linkage
  modified_base 20: mod_base = OTHER; note = 2'-O-methyluridine with a 3'-phosphorothioate linkage
  modified_base 21: mod_base = OTHER; note = 2'-O-methyladenosine
agagttattgaatcttaatta

SEQ ID NO: 1903 - RNA, 23 nt, synthetic construct
  source 1..23: mol_type = other RNA
  modified_base 1: mod_base = OTHER; note = 2'-O-methyluridine with a 3'-phosphorothioate linkage and a 5'-phosphate substitution
  modified_base 2: mod_base = OTHER; note = 2'-fluoroadenosine with a 3'-phosphorothioate linkage
  modified_base 3: mod_base = OTHER; note = 2'-O-methyladenosine
  modified_base 4: mod_base = um
  modified_base 5: mod_base = OTHER; note = 2'-fluorouridine
  modified_base 6: mod_base = OTHER; note = 2'-O-methyladenosine
  modified_base 7: mod_base = OTHER; note = 2'-fluoroadenosine
  modified_base 8: mod_base = gm
  modified_base 9: mod_base = OTHER; note = 2'-O-methyladenosine
  modified_base 10: mod_base = um
  modified_base 11: mod_base = um
  modified_base 12: mod_base = cm
  modified_base 13: mod_base = OTHER; note = 2'-O-methyladenosine
  modified_base 14: mod_base = OTHER; note = 2'-fluoroadenosine
  modified_base 15: mod_base = um
  modified_base 16: mod_base = OTHER; note = 2'-fluoroadenosine
  modified_base 17: mod_base = OTHER; note = 2'-O-methyladenosine
  modified_base 18: mod_base = cm
  modified_base 19: mod_base = um
  modified_base 20: mod_base = cm
  modified_base 21: mod_base = OTHER; note = 2'-O-methyluridine with a 3'-phosphorothioate linkage
  modified_base 22: mod_base = OTHER; note = 2'-O-methylguanosine with a 3'-phosphorothioate linkage
  modified_base 23: mod_base = cm
taattaagattcaataactctgc

SEQ ID NO: 1904 - RNA, 21 nt, synthetic construct
  source 1..21: mol_type = other RNA
  modified_base 1: mod_base = OTHER; note = 2'-O-methylguanosine with a 3'-phosphorothioate linkage
  modified_base 2: mod_base = OTHER; note = 2'-O-methyladenosine with a 3'-phosphorothioate linkage
  modified_base 3: mod_base = gm
  modified_base 4: mod_base = um
  modified_base 5: mod_base = um
  modified_base 6: mod_base = OTHER; note = 2'-O-methyladenosine
  modified_base 7: mod_base = um
  modified_base 8: mod_base = um
  modified_base 9: mod_base = OTHER; note = 2'-fluoroguanosine
  modified_base 10: mod_base = OTHER; note = 2'-fluoroadenosine
  modified_base 11: mod_base = OTHER; note = 2'-fluoroadenosine
  modified_base 12: mod_base = um
  modified_base 13: mod_base = cm
  modified_base 14: mod_base = um
  modified_base 15: mod_base = um
  modified_base 16: mod_base = OTHER; note = 2'-O-methyladenosine
  modified_base 17: mod_base = OTHER; note = 2'-O-methyladenosine
  modified_base 18: mod_base = um
  modified_base 19: mod_base = OTHER; note = 2'-O-methyluridine with a 3'-phosphorothioate linkage
  modified_base 20: mod_base = OTHER; note = 2'-O-methyluridine with a 3'-phosphorothioate linkage
  modified_base 21: mod_base = OTHER; note = 2'-O-methyladenosine
gagttattgaatcttaattta

SEQ ID NO: 1905 - RNA, 23 nt, synthetic construct
  source 1..23: mol_type = other RNA
  modified_base 1: mod_base = OTHER; note = 2'-O-methyluridine with a 3'-phosphorothioate linkage and a 5'-phosphate substitution
  modified_base 2: mod_base = OTHER; note = 2'-fluoroadenosine with a 3'-phosphorothioate linkage
  modified_base 3: mod_base = OTHER; note = 2'-O-methyladenosine
  modified_base 4: mod_base = OTHER; note = 2'-O-methyladenosine
  modified_base 5: mod_base = OTHER; note = 2'-fluorouridine
  modified_base 6: mod_base = um
  modified_base 7: mod_base = OTHER; note = 2'-fluoroadenosine
  modified_base 8: mod_base = OTHER; note = 2'-O-methyladenosine
  modified_base 9: mod_base = gm
  modified_base 10: mod_base = OTHER; note = 2'-O-methyladenosine
  modified_base 11: mod_base = um
  modified_base 12: mod_base = um
  modified_base 13: mod_base = cm
  modified_base 14: mod_base = OTHER; note = 2'-fluoroadenosine
  modified_base 15: mod_base = OTHER; note = 2'-O-methyladenosine
  modified_base 16: mod_base = OTHER; note = 2'-fluorouridine
  modified_base 17: mod_base = OTHER; note = 2'-O-methyladenosine
  modified_base 18: mod_base = OTHER; note = 2'-O-methyladenosine
  modified_base 19: mod_base = cm
  modified_base 20: mod_base = um
  modified_base 21: mod_base = OTHER; note = 2'-O-methylcytidine with a 3'-phosphorothioate linkage
  modified_base 22: mod_base = OTHER; note = 2'-O-methyluridine with a 3'-phosphorothioate linkage
  modified_base 23: mod_base = gm
taaattaagattcaataactctg

SEQ ID NO: 1906 - RNA, 21 nt, synthetic construct
  source 1..21: mol_type = other RNA
  modified_base 1: mod_base = OTHER; note = 2'-O-methyluridine with a 3'-phosphorothioate linkage
  modified_base 2: mod_base = OTHER; note = 2'-O-methyluridine with a 3'-phosphorothioate linkage
  modified_base 3: mod_base = um
  modified_base 4: mod_base = um
  modified_base 5: mod_base = um
  modified_base 6: mod_base = OTHER; note = 2'-O-methyladenosine
  modified_base 7: mod_base = OTHER; note = 2'-O-methyladenosine
  modified_base 8: mod_base = um
  modified_base 9: mod_base = OTHER; note = 2'-fluoroguanosine
  modified_base 10: mod_base = OTHER; note = 2'-fluorouridine
  modified_base 11: mod_base = OTHER; note = 2'-fluoroadenosine
  modified_base 12: mod_base = cm
  modified_base 13: mod_base = OTHER; note = 2'-O-methyladenosine
  modified_base 14: mod_base = OTHER; note = 2'-O-methyladenosine
  modified_base 15: mod_base = gm
  modified_base 16: mod_base = um
  modified_base 17: mod_base = um
  modified_base 18: mod_base = um
  modified_base 19: mod_base = OTHER; note = 2'-O-methyluridine with a 3'-phosphorothioate linkage
  modified_base 20: mod_base = OTHER; note = 2'-O-methylguanosine with a 3'-phosphorothioate linkage
  modified_base 21: mod_base = OTHER; note = 2'-O-methyladenosine
tttttaatgtacaagttttga

SEQ ID NO: 1907 - RNA, 23 nt, synthetic construct
  source 1..23: mol_type = other RNA
  modified_base 1: mod_base = OTHER; note = 2'-O-methyluridine with a 3'-phosphorothioate linkage and a 5'-phosphate substitution
  modified_base 2: mod_base = OTHER; note = 2'-fluorocytidine with a 3'-phosphorothioate linkage
  modified_base 3: mod_base = OTHER; note = 2'-O-methyladenosine
  modified_base 4: mod_base = OTHER; note = 2'-O-methyladenosine
  modified_base 5: mod_base = OTHER; note = 2'-fluoroadenosine
  modified_base 6: mod_base = OTHER; note = 2'-O-methyladenosine
  modified_base 7: mod_base = OTHER; note = 2'-fluorocytidine
  modified_base 8: mod_base = um
  modified_base 9: mod_base = um
  modified_base 10: mod_base = gm
  modified_base 11: mod_base = um
  modified_base 12: mod_base = OTHER; note = 2'-O-methyladenosine
  modified_base 13: mod_base = cm
  modified_base 14: mod_base = OTHER; note = 2'-fluoroadenosine
  modified_base 15: mod_base = um
  modified_base 16: mod_base = OTHER; note = 2'-fluorouridine
  modified_base 17: mod_base = OTHER; note = 2'-O-methyladenosine
  modified_base 18: mod_base = OTHER; note = 2'-O-methyladenosine
  modified_base 19: mod_base = OTHER; note = 2'-O-methyladenosine
  modified_base 20: mod_base = OTHER; note = 2'-O-methyladenosine
  modified_base 21: mod_base = OTHER; note = 2'-O-methyladenosine with a 3'-phosphorothioate linkage
  modified_base 22: mod_base = OTHER; note = 2'-O-methyladenosine with a 3'-phosphorothioate linkage
  modified_base 23: mod_base = OTHER; note = 2'-O-methyladenosine
tcaaaacttgtacattaaaaaaa

SEQ ID NO: 1908 - RNA, 21 nt, synthetic construct
  source 1..21: mol_type = other RNA
  modified_base 1: mod_base = OTHER; note = 2'-O-methyluridine with a 3'-phosphorothioate linkage
  modified_base 2: mod_base = OTHER; note = 2'-O-methyluridine with a 3'-phosphorothioate linkage
  modified_base 3: mod_base = um
  modified_base 4: mod_base = OTHER; note = 2'-O-methyladenosine
  modified_base 5: mod_base = OTHER; note = 2'-O-methyladenosine
  modified_base 6: mod_base = um
  modified_base 7: mod_base = gm
  modified_base 8: mod_base = um
  modified_base 9: mod_base = OTHER; note = 2'-fluoroadenosine
  modified_base 10: mod_base = OTHER; note = 2'-fluorocytidine
  modified_base 11: mod_base = OTHER; note = 2'-fluoroadenosine
  modified_base 12: mod_base = OTHER; note = 2'-O-methyladenosine
  modified_base 13: mod_base = gm
  modified_base 14: mod_base = um
  modified_base 15: mod_base = um
  modified_base 16: mod_base = um
  modified_base 17: mod_base = um
  modified_base 18: mod_base = gm
  modified_base 19: mod_base = OTHER; note = 2'-O-methyluridine with a 3'-phosphorothioate linkage
  modified_base 20: mod_base = OTHER; note = 2'-O-methyladenosine with a 3'-phosphorothioate linkage
  modified_base 21: mod_base = OTHER; note = 2'-O-methyladenosine
tttaatgtacaagttttgtaa

SEQ ID NO: 1909 - RNA, 23 nt, synthetic construct
  source 1..23: mol_type = other RNA
  modified_base 1: mod_base = OTHER; note = 2'-O-methyluridine with a 3'-phosphorothioate linkage and a 5'-phosphate substitution
  modified_base 2: mod_base = OTHER; note = 2'-fluorouridine with a 3'-phosphorothioate linkage
  modified_base 3: mod_base = OTHER; note = 2'-O-methyladenosine
  modified_base 4: mod_base = cm
  modified_base 5: mod_base = OTHER; note = 2'-fluoroadenosine
  modified_base 6: mod_base = OTHER; note = 2'-O-methyladenosine
  modified_base 7: mod_base = OTHER; note = 2'-fluoroadenosine
  modified_base 8: mod_base = OTHER; note = 2'-O-methyladenosine
  modified_base 9: mod_base = cm
  modified_base 10: mod_base = um
  modified_base 11: mod_base = um
  modified_base 12: mod_base = gm
  modified_base 13: mod_base = um
  modified_base 14: mod_base = OTHER; note = 2'-fluoroadenosine
  modified_base 15: mod_base = cm
  modified_base 16: mod_base = OTHER; note = 2'-fluoroadenosine
  modified_base 17: mod_base = um
  modified_base 18: mod_base = um
  modified_base 19: mod_base = OTHER; note = 2'-O-methyladenosine
  modified_base 20: mod_base = OTHER; note = 2'-O-methyladenosine
  modified_base 21: mod_base = OTHER; note = 2'-O-methyladenosine with a 3'-phosphorothioate linkage
  modified_base 22: mod_base = OTHER; note = 2'-O-methyladenosine with a 3'-phosphorothioate linkage
  modified_base 23: mod_base = OTHER; note = 2'-O-methyladenosine
ttacaaaacttgtacattaaaaa

SEQ ID NO: 1910 - RNA, 21 nt, synthetic construct
  source 1..21: mol_type = other RNA
  modified_base 1: mod_base = OTHER; note = 2'-O-methyladenosine with a 3'-phosphorothioate linkage
  modified_base 2: mod_base = OTHER; note = 2'-O-methyladenosine with a 3'-phosphorothioate linkage
  modified_base 3: mod_base = OTHER; note = 2'-O-methyladenosine
  modified_base 4: mod_base = um
  modified_base 5: mod_base = OTHER; note = 2'-O-methyladenosine
  modified_base 6: mod_base = OTHER; note = 2'-O-methyladenosine
  modified_base 7: mod_base = um
  modified_base 8: mod_base = OTHER; note = 2'-O-methyladenosine
  modified_base 9: mod_base = OTHER; note = 2'-fluoroadenosine
  modified_base 10: mod_base = OTHER; note = 2'-fluoroadenosine
  modified_base 11: mod_base = OTHER; note = 2'-fluoroguanosine
  modified_base 12: mod_base = OTHER; note = 2'-O-methyladenosine
  modified_base 13: mod_base = OTHER; note = 2'-O-methyladenosine
  modified_base 14: mod_base = cm
  modified_base 15: mod_base = um
  modified_base 16: mod_base = cm
  modified_base 17: mod_base = cm
  modified_base 18: mod_base = um
  modified_base 19: mod_base = OTHER; note = 2'-O-methyluridine with a 3'-phosphorothioate linkage
  modified_base 20: mod_base = OTHER; note = 2'-O-methyladenosine with a 3'-phosphorothioate linkage
  modified_base 21: mod_base = OTHER; note = 2'-O-methyladenosine
aaataataaagaactccttaa

SEQ ID NO: 1911 - RNA, 23 nt, synthetic construct
  source 1..23: mol_type = other RNA
  modified_base 1: mod_base = OTHER; note = 2'-O-methyluridine with a 3'-phosphorothioate linkage and a 5'-phosphate substitution
  modified_base 2: mod_base = OTHER; note = 2'-fluorouridine with a 3'-phosphorothioate linkage
  modified_base 3: mod_base = OTHER; note = 2'-O-methyladenosine
  modified_base 4: mod_base = OTHER; note = 2'-O-methyladenosine
  modified_base 5: mod_base = OTHER; note = 2'-fluoroguanosine
  modified_base 6: mod_base = gm
  modified_base 7: mod_base = OTHER; note = 2'-fluoroadenosine
  modified_base 8: mod_base = gm
  modified_base 9: mod_base = um
  modified_base 10: mod_base = um
  modified_base 11: mod_base = cm
  modified_base 12: mod_base = um
  modified_base 13: mod_base = um
  modified_base 14: mod_base = OTHER; note = 2'-fluorouridine
  modified_base 15: mod_base = OTHER; note = 2'-O-methyladenosine
  modified_base 16: mod_base = OTHER; note = 2'-fluorouridine
  modified_base 17: mod_base = um
  modified_base 18: mod_base = OTHER; note = 2'-O-methyladenosine
  modified_base 19: mod_base = um
  modified_base 20: mod_base = um
  modified_base 21: mod_base = OTHER; note = 2'-O-methyluridine with a 3'-phosphorothioate linkage
  modified_base 22: mod_base = OTHER; note = 2'-O-methyladenosine with a 3'-phosphorothioate linkage
  modified_base 23: mod_base = um
ttaaggagttctttattatttat

SEQ ID NO: 1912 - RNA, 21 nt, synthetic construct
  source 1..21: mol_type = other RNA
  modified_base 1: mod_base = OTHER; note = 2'-O-methyladenosine with a 3'-phosphorothioate linkage
  modified_base 2: mod_base = OTHER; note = 2'-O-methyladenosine with a 3'-phosphorothioate linkage
  modified_base 3: mod_base = um
  modified_base 4: mod_base = OTHER; note = 2'-O-methyladenosine
  modified_base 5: mod_base = OTHER; note = 2'-O-methyladenosine
  modified_base 6: mod_base = um
  modified_base 7: mod_base = OTHER; note = 2'-O-methyladenosine
  modified_base 8: mod_base = OTHER; note = 2'-O-methyladenosine
  modified_base 9: mod_base = OTHER; note = 2'-fluoroadenosine
  modified_base 10: mod_base = OTHER; note = 2'-fluoroguanosine
  modified_base 11: mod_base = OTHER; note = 2'-fluoroadenosine
  modified_base 12: mod_base = OTHER; note = 2'-O-methyladenosine
  modified_base 13: mod_base = cm
  modified_base 14: mod_base = um
  modified_base 15: mod_base = cm
  modified_base 16: mod_base = cm
  modified_base 17: mod_base = um
  modified_base 18: mod_base = um
  modified_base 19: mod_base = OTHER; note = 2'-O-methyladenosine with a 3'-phosphorothioate linkage
  modified_base 20: mod_base = OTHER; note = 2'-O-methyluridine with a 3'-phosphorothioate linkage
  modified_base 21: mod_base = OTHER; note = 2'-O-methyladenosine
aataataaagaactccttata

SEQ ID NO: 1913 - RNA, 23 nt, synthetic construct
  source 1..23: mol_type = other RNA
  modified_base 1: mod_base = OTHER; note = 2'-O-methyluridine with a 3'-phosphorothioate linkage and a 5'-phosphate substitution
  modified_base 2: mod_base = OTHER; note = 2'-fluoroadenosine with a 3'-phosphorothioate linkage
  modified_base 3: mod_base = um
  modified_base 4: mod_base = OTHER; note = 2'-O-methyladenosine
  modified_base 5: mod_base = OTHER; note = 2'-fluoroadenosine
  modified_base 6: mod_base = gm
  modified_base 7: mod_base = OTHER; note = 2'-fluoroguanosine
  modified_base 8: mod_base = OTHER; note = 2'-O-methyladenosine
  modified_base 9: mod_base = gm
  modified_base 10: mod_base = um
  modified_base 11: mod_base = um
  modified_base 12: mod_base = cm
  modified_base 13: mod_base = um
  modified_base 14: mod_base = OTHER; note = 2'-fluorouridine
  modified_base 15: mod_base = um
  modified_base 16: mod_base = OTHER; note = 2'-fluoroadenosine
  modified_base 17: mod_base = um
  modified_base 18: mod_base = um
  modified_base 19: mod_base = OTHER; note = 2'-O-methyladenosine
  modified_base 20: mod_base = um
  modified_base 21: mod_base = OTHER; note = 2'-O-methyluridine with a 3'-phosphorothioate linkage
  modified_base 22: mod_base = OTHER; note = 2'-O-methyluridine with a 3'-phosphorothioate linkage
  modified_base 23: mod_base = OTHER; note = 2'-O-methyladenosine
tataaggagttctttattattta

SEQ ID NO: 1914 - RNA, 21 nt, synthetic construct
  source 1..21: mol_type = other RNA
  modified_base 1: mod_base = OTHER; note = 2'-O-methyladenosine with a 3'-phosphorothioate linkage
  modified_base 2: mod_base = OTHER; note = 2'-O-methyluridine with a 3'-phosphorothioate linkage
  modified_base 3: mod_base = OTHER; note = 2'-O-methyladenosine
  modified_base 4: mod_base = OTHER; note = 2'-O-methyladenosine
  modified_base 5: mod_base = um
  modified_base 6: mod_base = OTHER; note = 2'-O-methyladenosine
  modified_base 7: mod_base = OTHER; note = 2'-O-methyladenosine
  modified_base 8: mod_base = OTHER; note = 2'-O-methyladenosine
  modified_base 9: mod_base = OTHER; note = 2'-fluoroguanosine
  modified_base 10: mod_base = OTHER; note = 2'-fluoroadenosine
  modified_base 11: mod_base = OTHER; note = 2'-fluoroadenosine
  modified_base 12: mod_base = cm
  modified_base 13: mod_base = um
  modified_base 14: mod_base = cm
  modified_base 15: mod_base = cm
  modified_base 16: mod_base = um
  modified_base 17: mod_base = um
  modified_base 18: mod_base = OTHER; note = 2'-O-methyladenosine
  modified_base 19: mod_base = OTHER; note = 2'-O-methyluridine with a 3'-phosphorothioate linkage
  modified_base 20: mod_base = OTHER; note = 2'-O-methyluridine with a 3'-phosphorothioate linkage
  modified_base 21: mod_base = OTHER; note = 2'-O-methyladenosine
ataataaagaactccttatta

SEQ ID NO: 1915 - RNA, 23 nt, synthetic construct
  source 1..23: mol_type = other RNA
  modified_base 1: mod_base = OTHER; note = 2'-O-methyluridine with a 3'-phosphorothioate linkage and a 5'-phosphate substitution
  modified_base 2: mod_base = OTHER; note = 2'-fluoroadenosine with a 3'-phosphorothioate linkage
  modified_base 3: mod_base = OTHER; note = 2'-O-methyladenosine
  modified_base 4: mod_base = um
  modified_base 5: mod_base = OTHER; note = 2'-fluoroadenosine
  modified_base 6: mod_base = OTHER; note = 2'-O-methyladenosine
  modified_base 7: mod_base = OTHER; note = 2'-fluoroguanosine
  modified_base 8: mod_base = gm
  modified_base 9: mod_base = OTHER; note = 2'-O-methyladenosine
  modified_base 10: mod_base = gm
  modified_base 11: mod_base = um
  modified_base 12: mod_base = um
  modified_base 13: mod_base = cm
  modified_base 14: mod_base = OTHER; note = 2'-fluorouridine
  modified_base 15: mod_base = um
  modified_base 16: mod_base = OTHER; note = 2'-fluorouridine
  modified_base 17: mod_base = OTHER; note = 2'-O-methyladenosine
  modified_base 18: mod_base = um
  modified_base 19: mod_base = um
  modified_base 20: mod_base = OTHER; note = 2'-O-methyladenosine
  modified_base 21: mod_base = OTHER; note = 2'-O-methyluridine with a 3'-phosphorothioate linkage
  modified_base 22: mod_base = OTHER; note = 2'-O-methyluridine with a 3'-phosphorothioate linkage
  modified_base 23: mod_base = um
taataaggagttctttattattt

SEQ ID NO: 1916 - RNA, 21 nt, synthetic construct
  source 1..21: mol_type = other RNA
  modified_base 1: mod_base = OTHER; note = 2'-O-methyluridine with a 3'-phosphorothioate linkage
  modified_base 2: mod_base = OTHER; note = 2'-O-methyladenosine with a 3'-phosphorothioate linkage
  modified_base 3: mod_base = OTHER; note = 2'-O-methyladenosine
  modified_base 4: mod_base = um
  modified_base 5: mod_base = OTHER; note = 2'-O-methyladenosine
  modified_base 6: mod_base = OTHER; note = 2'-O-methyladenosine
  modified_base 7: mod_base = OTHER; note = 2'-O-methyladenosine
  modified_base 8: mod_base = gm
  modified_base 9: mod_base = OTHER; note = 2'-fluoroadenosine
  modified_base 10: mod_base = OTHER; note = 2'-fluoroadenosine
  modified_base 11: mod_base = OTHER; note = 2'-fluorocytidine
  modified_base 12: mod_base = um
  modified_base 13: mod_base = cm
  modified_base 14: mod_base = cm
  modified_base 15: mod_base = um
  modified_base 16: mod_base = um
  modified_base 17: mod_base = OTHER; note = 2'-O-methyladenosine
  modified_base 18: mod_base = um
  modified_base 19: mod_base = OTHER; note = 2'-O-methyluridine with a 3'-phosphorothioate linkage
  modified_base 20: mod_base = OTHER; note = 2'-O-methyluridine with a 3'-phosphorothioate linkage
  modified_base 21: mod_base = OTHER; note = 2'-O-methyladenosine
taataaagaactccttattta

SEQ ID NO: 1917 - RNA, 23 nt, synthetic construct
  source 1..23: mol_type = other RNA
  modified_base 1: mod_base = OTHER; note = 2'-O-methyluridine with a 3'-phosphorothioate linkage and a 5'-phosphate substitution
  modified_base 2: mod_base = OTHER; note = 2'-fluoroadenosine with a 3'-phosphorothioate linkage
  modified_base 3: mod_base = OTHER; note = 2'-O-methyladenosine
  modified_base 4: mod_base = OTHER; note = 2'-O-methyladenosine
  modified_base 5: mod_base = OTHER; note = 2'-fluorouridine
  modified_base 6: mod_base = OTHER; note = 2'-O-methyladenosine
  modified_base 7: mod_base = OTHER; note = 2'-fluoroadenosine
  modified_base 8: mod_base = gm
  modified_base 9: mod_base = gm
  modified_base 10: mod_base = OTHER; note = 2'-O-methyladenosine
  modified_base 11: mod_base = gm
  modified_base 12: mod_base = um
  modified_base 13: mod_base = um
  modified_base 14: mod_base = OTHER; note = 2'-fluorocytidine
  modified_base 15: mod_base = um
  modified_base 16: mod_base = OTHER; note = 2'-fluorouridine
  modified_base 17: mod_base = um
  modified_base 18: mod_base = OTHER; note = 2'-O-methyladenosine
  modified_base 19: mod_base = um
  modified_base 20: mod_base = um
  modified_base 21: mod_base = OTHER; note = 2'-O-methyladenosine with a 3'-phosphorothioate linkage
  modified_base 22: mod_base = OTHER; note = 2'-O-methyluridine with a 3'-phosphorothioate linkage
  modified_base 23: mod_base = um
taaataaggagttctttattatt

SEQ ID NO: 1918 - RNA, 21 nt, synthetic construct
  source 1..21: mol_type = other RNA
  modified_base 1: mod_base = OTHER; note = 2'-O-methyladenosine with a 3'-phosphorothioate linkage
  modified_base 2: mod_base = OTHER; note = 2'-O-methyladenosine with a 3'-phosphorothioate linkage
  modified_base 3: mod_base = um
  modified_base 4: mod_base = OTHER; note = 2'-O-methyladenosine
  modified_base 5: mod_base = OTHER; note = 2'-O-methyladenosine
  modified_base 6: mod_base = OTHER; note = 2'-O-methyladenosine
  modified_base 7: mod_base = gm
  modified_base 8: mod_base = OTHER; note = 2'-O-methyladenosine
  modified_base 9: mod_base = OTHER; note = 2'-fluoroadenosine
  modified_base 10: mod_base = OTHER; note = 2'-fluorocytidine
  modified_base 11: mod_base = OTHER; note = 2'-fluorouridine
  modified_base 12: mod_base = cm
  modified_base 13: mod_base = cm
  modified_base 14: mod_base = um
  modified_base 15: mod_base = um
  modified_base 16: mod_base = OTHER; note = 2'-O-methyladenosine
  modified_base 17: mod_base = um
  modified_base 18: mod_base = um
  modified_base 19: mod_base = OTHER; note = 2'-O-methyluridine with a 3'-phosphorothioate linkage
  modified_base 20: mod_base = OTHER; note = 2'-O-methyluridine with a 3'-phosphorothioate linkage
  modified_base 21: mod_base = OTHER; note = 2'-O-methyladenosine
aataaagaactccttatttta

SEQ ID NO: 1919 - RNA, 23 nt, synthetic construct
  source 1..23: mol_type = other RNA
  modified_base 1: mod_base = OTHER; note = 2'-O-methyluridine with a 3'-phosphorothioate linkage and a 5'-phosphate substitution
  modified_base 2: mod_base = OTHER; note = 2'-fluoroadenosine with a 3'-phosphorothioate linkage
  modified_base 3: mod_base = OTHER; note = 2'-O-methyladenosine
  modified_base 4: mod_base = OTHER; note = 2'-O-methyladenosine
  modified_base 5: mod_base = OTHER; note = 2'-fluoroadenosine
  modified_base 6: mod_base = um
  modified_base 7: mod_base = OTHER; note = 2'-fluoroadenosine
  modified_base 8: mod_base = OTHER; note = 2'-O-methyladenosine
  modified_base 9: mod_base = gm
  modified_base 10: mod_base = gm
  modified_base 11: mod_base = OTHER; note = 2'-O-methyladenosine
  modified_base 12: mod_base = gm
  modified_base 13: mod_base = um
  modified_base 14: mod_base = OTHER; note = 2'-fluorouridine
  modified_base 15: mod_base = cm
  modified_base 16: mod_base = OTHER; note = 2'-fluorouridine
  modified_base 17: mod_base = um
  modified_base 18: mod_base = um
  modified_base 19: mod_base = OTHER; note = 2'-O-methyladenosine
  modified_base 20: mod_base = um
  modified_base 21: mod_base = OTHER; note = 2'-O-methyluridine with a 3'-phosphorothioate linkage
  modified_base 22: mod_base = OTHER; note = 2'-O-methyladenosine with a 3'-phosphorothioate linkage
  modified_base 23: mod_base = um
taaaataaggagttctttattat

SEQ ID NO: 1920 - RNA, 21 nt, synthetic construct
  source 1..21: mol_type = other RNA
  modified_base 1: mod_base = OTHER; note = 2'-O-methyladenosine with a 3'-phosphorothioate linkage
  modified_base 2: mod_base = OTHER; note = 2'-O-methylcytidine with a 3'-phosphorothioate linkage
  modified_base 3: mod_base = OTHER; note = 2'-O-methyladenosine
  modified_base 4: mod_base = um
  modified_base 5: mod_base = cm
  modified_base 6: mod_base = um
  modified_base 7: mod_base = OTHER; note = 2'-O-methyladenosine
  modified_base 8: mod_base = OTHER; note = 2'-O-methyladenosine
  modified_base 9: mod_base = OTHER; note = 2'-fluorouridine
  modified_base 10: mod_base = OTHER; note = 2'-fluoroguanosine
  modified_base 11: mod_base = OTHER; note = 2'-fluorocytidine
  modified_base 12: mod_base = um
  modified_base 13: mod_base = um
  modified_base 14: mod_base = cm
  modified_base 15: mod_base = OTHER; note = 2'-O-methyladenosine
  modified_base 16: mod_base = OTHER; note = 2'-O-methyladenosine
  modified_base 17: mod_base = gm
  modified_base 18: mod_base = um
  modified_base 19: mod_base = OTHER; note = 2'-O-methylguanosine with a 3'-phosphorothioate linkage
  modified_base 20: mod_base = OTHER; note = 2'-O-methyluridine with a 3'-phosphorothioate linkage
  modified_base 21: mod_base = OTHER; note = 2'-O-methyladenosine
acatctaatgcttcaagtgta

SEQ ID NO: 1921 - RNA, 23 nt, synthetic construct
  source 1..23: mol_type = other RNA
  modified_base 1: mod_base = OTHER; note = 2'-O-methyluridine with a 3'-phosphorothioate linkage and a 5'-phosphate substitution
  modified_base 2: mod_base = OTHER; note = 2'-fluoroadenosine with a 3'-phosphorothioate linkage
  modified_base 3: mod_base = cm
  modified_base 4: mod_base = OTHER; note = 2'-O-methyladenosine
  modified_base 5: mod_base = OTHER; note = 2'-fluorocytidine
  modified_base 6: mod_base = um
  modified_base 7: mod_base = OTHER; note = 2'-fluorouridine
  modified_base 8: mod_base = gm
  modified_base 9: mod_base = OTHER; note = 2'-O-methyladenosine
  modified_base 10: mod_base = OTHER; note = 2'-O-methyladenosine
  modified_base 11: mod_base = gm
  modified_base 12: mod_base = cm
  modified_base 13: mod_base = OTHER; note = 2'-O-methyladenosine
  modified_base 14: mod_base = OTHER; note = 2'-fluorouridine
  modified_base 15: mod_base = um
  modified_base 16: mod_base = OTHER; note = 2'-fluoroadenosine
  modified_base 17: mod_base = gm
  modified_base 18: mod_base = OTHER; note = 2'-O-methyladenosine
  modified_base 19: mod_base = um
  modified_base 20: mod_base = gm
  modified_base 21: mod_base = OTHER; note = 2'-O-methyluridine with a 3'-phosphorothioate linkage
  modified_base 22: mod_base = OTHER; note = 2'-O-methyladenosine with a 3'-phosphorothioate linkage
  modified_base 23: mod_base = OTHER; note = 2'-O-methyladenosine
tacacttgaagcattagatgtaa

SEQ ID NO: 1922 - RNA, 21 nt, synthetic construct
  source 1..21: mol_type = other RNA
  modified_base 1: mod_base = OTHER; note = 2'-O-methyluridine with a 3'-phosphorothioate linkage
  modified_base 2: mod_base = OTHER; note = 2'-O-methylcytidine with a 3'-phosphorothioate linkage
  modified_base 3: mod_base = um
  modified_base 4: mod_base = gm
  modified_base 5: mod_base = OTHER; note = 2'-O-methyladenosine
  modified_base 6: mod_base = gm
  modified_base 7: mod_base = cm
  modified_base 8: mod_base = um
  modified_base 9: mod_base = OTHER; note = 2'-fluorouridine
  modified_base 10: mod_base = OTHER; note = 2'-fluorouridine
  modified_base 11: mod_base = OTHER; note = 2'-fluorouridine
  modified_base 12: mod_base = cm
  modified_base 13: mod_base = OTHER; note = 2'-O-methyladenosine
  modified_base 14: mod_base = um
  modified_base 15: mod_base = gm
  modified_base 16: mod_base = gm
  modified_base 17: mod_base = OTHER; note = 2'-O-methyladenosine
  modified_base 18: mod_base = OTHER; note = 2'-O-methyladenosine
  modified_base 19: mod_base = OTHER; note = 2'-O-methylguanosine with a 3'-phosphorothioate linkage
  modified_base 20: mod_base = OTHER; note = 2'-O-methyluridine with a 3'-phosphorothioate linkage
  modified_base 21: mod_base = OTHER; note = 2'-O-methyladenosine
tctgagcttttcatggaagta

SEQ ID NO: 1923 - RNA, 23 nt, synthetic construct
  source 1..23: mol_type = other RNA
  modified_base 1: mod_base = OTHER; note = 2'-O-methyluridine with a 3'-phosphorothioate linkage and a 5'-phosphate substitution
  modified_base 2: mod_base = OTHER; note = 2'-fluoroadenosine with a 3'-phosphorothioate linkage
  modified_base 3: mod_base = cm
  modified_base 4: mod_base = um
  modified_base 5: mod_base = OTHER; note = 2'-fluorouridine
  modified_base 6: mod_base = cm
  modified_base 7: mod_base = OTHER; note = 2'-fluorocytidine
  modified_base 8: mod_base = OTHER; note = 2'-O-methyladenosine
  modified_base 9: mod_base = um
  modified_base 10: mod_base = gm
  modified_base 11: mod_base = OTHER; note = 2'-O-methyladenosine
  modified_base 12: mod_base = OTHER; note = 2'-O-methyladenosine
  modified_base 13: mod_base = OTHER; note = 2'-O-methyladenosine
  modified_base 14: mod_base = OTHER; note = 2'-fluoroadenosine
  modified_base 15: mod_base = gm
  modified_base 16: mod_base = OTHER; note = 2'-fluorocytidine
  modified_base 17: mod_base = um
  modified_base 18: mod_base = cm
  modified_base 19: mod_base = OTHER; note = 2'-O-methyladenosine
  modified_base 20: mod_base = gm
  modified_base 21: mod_base = OTHER; note = 2'-O-methyladenosine with a 3'-phosphorothioate linkage
  modified_base 22: mod_base = OTHER; note = 2'-O-methyladenosine with a 3'-phosphorothioate linkage
  modified_base 23: mod_base = OTHER; note = 2'-O-methyladenosine
tacttccatgaaaagctcagaaa

SEQ ID NO: 1924 - RNA, 21 nt, synthetic construct
  source 1..21: mol_type = other RNA
  modified_base 1: mod_base = OTHER; note = 2'-O-methyluridine with a 3'-phosphorothioate linkage
  modified_base 2: mod_base = OTHER; note = 2'-O-methylguanosine with a 3'-phosphorothioate linkage
  modified_base 3: mod_base = OTHER; note = 2'-O-methyladenosine
  modified_base 4: mod_base = gm
  modified_base 5: mod_base = cm
  modified_base 6: mod_base = um
  modified_base 7: mod_base = um
  modified_base 8: mod_base = um
  modified_base 9: mod_base = OTHER; note = 2'-fluorouridine
  modified_base 10: mod_base = OTHER; note = 2'-fluorocytidine
  modified_base 11: mod_base = OTHER; note = 2'-fluoroadenosine
  modified_base 12: mod_base = um
  modified_base 13: mod_base = gm
  modified_base 14: mod_base = gm
  modified_base 15: mod_base = OTHER; note = 2'-O-methyladenosine
  modified_base 16: mod_base = OTHER; note = 2'-O-methyladenosine
  modified_base 17: mod_base = gm
  modified_base 18: mod_base = um
  modified_base 19: mod_base = OTHER; note = 2'-O-methylguanosine with a 3'-phosphorothioate linkage
  modified_base 20: mod_base = OTHER; note = 2'-O-methylguanosine with a 3'-phosphorothioate linkage
  modified_base 21: mod_base = OTHER; note = 2'-O-methyladenosine
tgagcttttcatggaagtgga

SEQ ID NO: 1925 - RNA, 23 nt, synthetic construct
  source 1..23: mol_type = other RNA
  modified_base 1: mod_base = OTHER; note = 2'-O-methyluridine with a 3'-phosphorothioate linkage and a 5'-phosphate substitution
  modified_base 2: mod_base = OTHER; note = 2'-fluorocytidine with a 3'-phosphorothioate linkage
  modified_base 3: mod_base = cm
  modified_base 4: mod_base = OTHER; note = 2'-O-methyladenosine
  modified_base 5: mod_base = OTHER; note = 2'-fluorocytidine
  modified_base 6: mod_base = um
  modified_base 7: mod_base = OTHER; note = 2'-fluorouridine
  modified_base 8: mod_base = cm
  modified_base 9: mod_base = cm
  modified_base 10: mod_base = OTHER; note = 2'-O-methyladenosine
  modified_base 11: mod_base = um
  modified_base 12: mod_base = gm
  modified_base 13: mod_base = OTHER; note = 2'-O-methyladenosine
  modified_base 14: mod_base = OTHER; note = 2'-fluoroadenosine
  modified_base 15: mod_base = OTHER; note = 2'-O-methyladenosine
  modified_base 16: mod_base = OTHER; note = 2'-fluoroadenosine
  modified_base 17: mod_base = gm
  modified_base 18: mod_base = cm
  modified_base 19: mod_base = um
  modified_base 20: mod_base = cm
  modified_base 21: mod_base = OTHER; note = 2'-O-methyladenosine with a 3'-phosphorothioate linkage
  modified_base 22: mod_base = OTHER; note = 2'-O-methylguanosine with a 3'-phosphorothioate linkage
  modified_base 23: mod_base = OTHER; note = 2'-O-methyladenosine
tccacttccatgaaaagctcaga

SEQ ID NO: 1926 - RNA, 21 nt, synthetic construct
  source 1..21: mol_type = other RNA
  modified_base 1: mod_base = OTHER; note = 2'-O-methyladenosine with a 3'-phosphorothioate linkage
  modified_base 2: mod_base = OTHER; note = 2'-O-methylguanosine with a 3'-phosphorothioate linkage
  modified_base 3: mod_base = cm
  modified_base 4: mod_base = um
  modified_base 5: mod_base = um
  modified_base 6: mod_base = um
  modified_base 7: mod_base = um
  modified_base 8: mod_base = cm
  modified_base 9: mod_base = OTHER; note = 2'-fluoroadenosine
  modified_base 10: mod_base = OTHER; note = 2'-fluorouridine
  modified_base 11: mod_base = OTHER; note = 2'-fluoroguanosine
  modified_base 12: mod_base = gm
  modified_base 13: mod_base = OTHER; note = 2'-O-methyladenosine
  modified_base 14: mod_base = OTHER; note = 2'-O-methyladenosine
  modified_base 15: mod_base = gm
  modified_base 16: mod_base = um
  modified_base 17: mod_base = gm
  modified_base 18: mod_base = gm
  modified_base 19: mod_base = OTHER; note = 2'-O-methylcytidine with a 3'-phosphorothioate linkage
  modified_base 20: mod_base = OTHER; note = 2'-O-methyladenosine with a 3'-phosphorothioate linkage
  modified_base 21: mod_base = OTHER; note = 2'-O-methyladenosine
agcttttcatggaagtggcaa

SEQ ID NO: 1927 - RNA, 23 nt, synthetic construct
  source 1..23: mol_type = other RNA
  modified_base 1: mod_base = OTHER; note = 2'-O-methyluridine with a 3'-phosphorothioate linkage and a 5'-phosphate substitution
  modified_base 2: mod_base = OTHER; note = 2'-fluorouridine with a 3'-phosphorothioate linkage
  modified_base 3: mod_base = gm
  modified_base 4: mod_base = cm
  modified_base 5: mod_base = OTHER; note = 2'-fluorocytidine
  modified_base 6: mod_base = OTHER; note = 2'-O-methyladenosine
  modified_base 7: mod_base = OTHER; note = 2'-fluorocytidine
  modified_base 8: mod_base = um
  modified_base 9: mod_base = um
  modified_base 10: mod_base = cm
  modified_base 11: mod_base = cm
  modified_base 12: mod_base = OTHER; note = 2'-O-methyladenosine
  modified_base 13: mod_base = um
  modified_base 14: mod_base = OTHER; note = 2'-fluoroguanosine
  modified_base 15: mod_base = OTHER; note = 2'-O-methyladenosine
  modified_base 16: mod_base = OTHER; note = 2'-fluoroadenosine
  modified_base 17: mod_base = OTHER; note = 2'-O-methyladenosine
  modified_base 18: mod_base = OTHER; note = 2'-O-methyladenosine
  modified_base 19: mod_base = gm
  modified_base 20: mod_base = cm
  modified_base 21: mod_base = OTHER; note = 2'-O-methyluridine with a 3'-phosphorothioate linkage
  modified_base 22: mod_base = OTHER; note = 2'-O-methylcytidine with a 3'-phosphorothioate linkage
  modified_base 23: mod_base = OTHER; note = 2'-O-methyladenosine
ttgccacttccatgaaaagctca

SEQ ID NO: 1928 - RNA, 21 nt, synthetic construct
  source 1..21: mol_type = other RNA
  modified_base 1: mod_base = OTHER; note = 2'-O-methyluridine with a 3'-phosphorothioate linkage
  modified_base 2: mod_base = OTHER; note = 2'-O-methyluridine with a 3'-phosphorothioate linkage
  modified_base 3: mod_base = cm
  modified_base 4: mod_base = OTHER; note = 2'-O-methyladenosine
  modified_base 5: mod_base = um
  modified_base 6: mod_base = gm
  modified_base 7: mod_base = gm
  modified_base 8: mod_base = OTHER; note = 2'-O-methyladenosine
  modified_base 9: mod_base = OTHER; note = 2'-fluoroadenosine
  modified_base 10: mod_base = OTHER; note = 2'-fluoroguanosine
  modified_base 11: mod_base = OTHER; note = 2'-fluorouridine
  modified_base 12: mod_base = gm
  modified_base 13: mod_base = gm
  modified_base 14: mod_base = cm
  modified_base 15: mod_base = OTHER; note = 2'-O-methyladenosine
  modified_base 16: mod_base = gm
  modified_base 17: mod_base = um
  modified_base 18: mod_base = gm
  modified_base 19: mod_base = OTHER; note = 2'-O-methyladenosine with a 3'-phosphorothioate linkage
  modified_base 20: mod_base = OTHER; note = 2'-O-methyladenosine with a 3'-phosphorothioate linkage
  modified_base 21: mod_base = OTHER; note = 2'-O-methyladenosine
ttcatggaagtggcagtgaaa

SEQ ID NO: 1929 - RNA, 23 nt, synthetic construct
  source 1..23: mol_type = other RNA
  modified_base 1: mod_base = OTHER; note = 2'-O-methyluridine with a 3'-phosphorothioate linkage and a 5'-phosphate substitution
  modified_base 2: mod_base = OTHER; note = 2'-fluorouridine with a 3'-phosphorothioate linkage
  modified_base 3: mod_base = um
  modified_base 4: mod_base = cm
  modified_base 5: mod_base = OTHER; note = 2'-fluoroadenosine
  modified_base 6: mod_base = cm
  modified_base 7: mod_base = OTHER; note = 2'-fluorouridine
  modified_base 8: mod_base = gm
  modified_base 9: mod_base = cm
  modified_base 10: mod_base = cm
  modified_base 11: mod_base = OTHER; note = 2'-O-methyladenosine
  modified_base 12: mod_base = cm
  modified_base 13: mod_base = um
  modified_base 14: mod_base = OTHER; note = 2'-fluorouridine
  modified_base 15: mod_base = cm
  modified_base 16: mod_base = OTHER; note = 2'-fluorocytidine
  modified_base 17: mod_base = OTHER; note = 2'-O-methyladenosine
  modified_base 18: mod_base = um
  modified_base 19: mod_base = gm
  modified_base 20: mod_base = OTHER; note = 2'-O-methyladenosine
  modified_base 21: mod_base = OTHER; note = 2'-O-methyladenosine with a 3'-phosphorothioate linkage
  modified_base 22: mod_base = OTHER; note = 2'-O-methyladenosine with a 3'-phosphorothioate linkage
  modified_base 23: mod_base = OTHER; note = 2'-O-methyladenosine
tttcactgccacttccatgaaaa

SEQ ID NO: 1930 - RNA, 21 nt, synthetic construct
  source 1..21: mol_type = other RNA
  modified_base 1: mod_base = OTHER; note = 2'-O-methyluridine with a 3'-phosphorothioate linkage
  modified_base 2: mod_base = OTHER; note = 2'-O-methyluridine with a 3'-phosphorothioate linkage
  modified_base 3: mod_base = OTHER; note = 2'-O-methyladenosine
  modified_base 4: mod_base = OTHER; note = 2'-O-methyladenosine
  modified_base 5: mod_base = um
  modified_base 6: mod_base = gm
  modified_base 7: mod_base = um
  modified_base 8: mod_base = um
  modified_base 9: mod_base = OTHER; note = 2'-fluorouridine
  modified_base 10: mod_base = OTHER; note = 2'-fluorouridine
  modified_base 11: mod_base = OTHER; note = 2'-fluoroguanosine
  modified_base 12: mod_base = um
  modified_base 13: mod_base = OTHER; note = 2'-O-methyladenosine
  modified_base 14: mod_base = cm
  modified_base 15: mod_base = OTHER; note = 2'-O-methyladenosine
  modified_base 16: mod_base = OTHER; note = 2'-O-methyladenosine
  modified_base 17: mod_base = um
  modified_base 18: mod_base = um
  modified_base 19: mod_base = OTHER; note = 2'-O-methyladenosine with a 3'-phosphorothioate linkage
  modified_base 20: mod_base = OTHER; note = 2'-O-methylcytidine with a 3'-phosphorothioate linkage
  modified_base 21: mod_base = OTHER; note = 2'-O-methyladenosine
ttaatgttttgtacaattaca

SEQ ID NO: 1931 - RNA, 23 nt, synthetic construct
  source 1..23: mol_type = other RNA
  modified_base 1: mod_base = OTHER; note = 2'-O-methyluridine with a 3'-phosphorothioate linkage and a 5'-phosphate substitution
  modified_base 2: mod_base = OTHER; note = 2'-fluoroguanosine with a 3'-phosphorothioate linkage
  modified_base 3: mod_base = um
  modified_base 4: mod_base = OTHER; note = 2'-O-methyladenosine
  modified_base 5: mod_base = OTHER; note = 2'-fluoroadenosine
  modified_base 6: mod_base = um
  modified_base 7: mod_base = OTHER; note = 2'-fluorouridine
  modified_base 8: mod_base = gm
  modified_base 9: mod_base = um
  modified_base 10: mod_base = OTHER; note = 2'-O-methyladenosine
  modified_base 11: mod_base = cm
  modified_base 12: mod_base = OTHER; note = 2'-O-methyladenosine
  modified_base 13: mod_base = OTHER; note = 2'-O-methyladenosine
  modified_base 14: mod_base = OTHER; note = 2'-fluoroadenosine
  modified_base 15: mod_base = OTHER; note = 2'-O-methyladenosine
  modified_base 16: mod_base = OTHER; note = 2'-fluorocytidine
  modified_base 17: mod_base = OTHER; note = 2'-O-methyladenosine
  modified_base 18: mod_base = um
  modified_base 19: mod_base = um
  modified_base 20: mod_base = OTHER; note = 2'-O-methyladenosine
  modified_base 21: mod_base = OTHER; note = 2'-O-methyladenosine with a 3'-phosphorothioate linkage
  modified_base 22: mod_base = OTHER; note = 2'-O-methyluridine with a 3'-phosphorothioate linkage
  modified_base 23: mod_base = cm
tgtaattgtacaaaacattaatc

SEQ ID NO: 1932 - RNA, 23 nt, synthetic construct
  source 1..23: mol_type = other RNA
  modified_base 1: mod_base = OTHER; note = 2'-O-methyluridine with a 3'-phosphorothioate linkage
  modified_base 2: mod_base = OTHER; note = 2'-fluoroadenosine with a 3'-phosphorothioate linkage
  modified_base 3: mod_base = gm
  modified_base 4: mod_base = um
  modified_base 5: mod_base = OTHER; note = 2'-fluorocytidine
  modified_base 6: mod_base = um
  modified_base 7: mod_base = OTHER; note = 2'-fluorouridine
  modified_base 8: mod_base = gm
  modified_base 9: mod_base = OTHER; note = 2'-O-methyladenosine
  modified_base 10: mod_base = cm
  modified_base 11: mod_base = OTHER; note = 2'-O-methyladenosine
  modified_base 12: mod_base = OTHER; note = 2'-O-methyladenosine
  modified_base 13: mod_base = cm
  modified_base 14: mod_base = OTHER; note = 2'-fluoroadenosine
  modified_base 15: mod_base = um
  modified_base 16: mod_base = OTHER; note = 2'-fluorouridine
  modified_base 17: mod_base = gm
  modified_base 18: mod_base = um
  modified_base 19: mod_base = OTHER; note = 2'-O-methyladenosine
  modified_base 20: mod_base = gm
  modified_base 21: mod_base = OTHER; note = 2'-O-methylcytidine with a 3'-phosphorothioate linkage
  modified_base 22: mod_base = OTHER; note = 2'-O-methyluridine with a 3'-phosphorothioate linkage
  modified_base 23: mod_base = OTHER; note = 2'-O-methyladenosine
tagtcttgacaacattgtagcta

SEQ ID NO: 1933 - RNA, 23 nt, synthetic construct
  source 1..23: mol_type = other RNA
  modified_base 1: mod_base = OTHER; note = 2'-O-methyluridine with a 3'-phosphorothioate linkage
  modified_base 2: mod_base = OTHER; note = 2'-fluoroadenosine with a 3'-phosphorothioate linkage
  modified_base 3: mod_base = OTHER; note = 2'-O-methyladenosine
  modified_base 4: mod_base = gm
  modified_base 5: mod_base = OTHER; note = 2'-fluorouridine
  modified_base 6: mod_base = cm
  modified_base 7: mod_base = OTHER; note = 2'-fluorouridine
  modified_base 8: mod_base = um
  modified_base 9: mod_base = gm
  modified_base 10: mod_base = OTHER; note = 2'-O-methyladenosine
  modified_base 11: mod_base = cm
  modified_base 12: mod_base = OTHER; note = 2'-O-methyladenosine
  modified_base 13: mod_base = OTHER; note = 2'-O-methyladenosine
  modified_base 14: mod_base = OTHER; note = 2'-fluorocytidine
  modified_base 15: mod_base = OTHER; note = 2'-O-methyladenosine
  modified_base 16: mod_base = OTHER; note = 2'-fluorouridine
  modified_base 17: mod_base = um
  modified_base 18: mod_base = gm
  modified_base 19: mod_base = um
  modified_base 20: mod_base = OTHER; note = 2'-O-methyladenosine
  modified_base 21: mod_base = OTHER; note = 2'-O-methylguanosine with a 3'-phosphorothioate linkage
  modified_base 22: mod_base = OTHER; note = 2'-O-methylcytidine with a 3'-phosphorothioate linkage
  modified_base 23: mod_base = um
taagtcttgacaacattgtagct

SEQ ID NO: 1934 - RNA, 23 nt, synthetic construct
  source 1..23: mol_type = other RNA
  modified_base 1: mod_base = OTHER; note = 2'-O-methyluridine with a 3'-phosphorothioate linkage
  modified_base 2: mod_base = OTHER; note = 2'-fluoroadenosine with a 3'-phosphorothioate linkage
  modified_base 3: mod_base = OTHER; note = 2'-O-methyladenosine
  modified_base 4: mod_base = cm
  modified_base 5: mod_base = OTHER; note = 2'-fluoroadenosine
  modified_base 6: mod_base = um
  modified_base 7: mod_base = OTHER; note = 2'-fluoroguanosine
  modified_base 8: mod_base = um
  modified_base 9: mod_base = um
  modified_base 10: mod_base = cm
  modified_base 11: mod_base = OTHER; note = 2'-O-methyladenosine
  modified_base 12: mod_base = um
  modified_base 13: mod_base = gm
  modified_base 14: mod_base = OTHER; note = 2'-fluoroguanosine
  modified_base 15: mod_base = OTHER; note = 2'-O-methyladenosine
  modified_base 16: mod_base = OTHER; note = 2'-fluorocytidine
  modified_base 17: mod_base = OTHER; note = 2'-O-methyladenosine
  modified_base 18: mod_base = um
  modified_base 19: mod_base = cm
  modified_base 20: mod_base = OTHER; note = 2'-O-methyladenosine
  modified_base 21: mod_base = OTHER; note = 2'-O-methyluridine with a 3'-phosphorothioate linkage
  modified_base 22: mod_base = OTHER; note = 2'-O-methylguanosine with a 3'-phosphorothioate linkage
  modified_base 23: mod_base = cm
taacatgttcatggacatcatgc

SEQ ID NO: 1935 - RNA, 23 nt, synthetic construct
  source 1..23: mol_type = other RNA
  modified_base 1: mod_base = OTHER; note = 2'-O-methyluridine with a 3'-phosphorothioate linkage
  modified_base 2: mod_base = OTHER; note = 2'-fluorocytidine with a 3'-phosphorothioate linkage
  modified_base 3: mod_base = um
  modified_base 4: mod_base = gm
  modified_base 5: mod_base = OTHER; note = 2'-fluoroguanosine
  modified_base 6: mod_base = OTHER; note = 2'-O-methyladenosine
  modified_base 7: mod_base = OTHER; note = 2'-fluoroadenosine
  modified_base 8: mod_base = cm
  modified_base 9: mod_base = um
  modified_base 10: mod_base = gm
  modified_base 11: mod_base = gm
  modified_base 12: mod_base = OTHER; note = 2'-O-methyladenosine
  modified_base 13: mod_base = OTHER; note = 2'-O-methyladenosine
  modified_base 14: mod_base = OTHER; note = 2'-fluoroguanosine
  modified_base 15: mod_base = um
  modified_base 16: mod_base = OTHER; note = 2'-fluoroadenosine
  modified_base 17: mod_base = OTHER; note = 2'-O-methyladenosine
  modified_base 18: mod_base = OTHER; note = 2'-O-methyladenosine
  modified_base 19: mod_base = um
  modified_base 20: mod_base = OTHER; note = 2'-O-methyladenosine
  modified_base 21: mod_base = OTHER; note = 2'-O-methyluridine with a 3'-phosphorothioate linkage
  modified_base 22: mod_base = OTHER; note = 2'-O-methyladenosine with a 3'-phosphorothioate linkage
  modified_base 23: mod_base = cm
tctggaactggaagtaaatatac

SEQ ID NO: 1936 - RNA, 23 nt, synthetic construct
  source 1..23: mol_type = other RNA
  modified_base 1: mod_base = OTHER; note = 2'-O-methyluridine with a 3'-phosphorothioate linkage
  modified_base 2: mod_base = OTHER; note = 2'-fluorouridine with a 3'-phosphorothioate linkage
  modified_base 3: mod_base = um
  modified_base 4: mod_base = cm
  modified_base 5: mod_base = OTHER; note = 2'-fluorouridine
  modified_base 6: mod_base = gm
  modified_base 7: mod_base = OTHER; note = 2'-fluoroguanosine
  modified_base 8: mod_base = OTHER; note = 2'-O-methyladenosine
  modified_base 9: mod_base = OTHER; note = 2'-O-methyladenosine
  modified_base 10: mod_base = cm
  modified_base 11: mod_base = um
  modified_base 12: mod_base = gm
  modified_base 13: mod_base = gm
  modified_base 14: mod_base = OTHER; note = 2'-fluoroadenosine
  modified_base 15: mod_base = OTHER; note = 2'-O-methyladenosine
  modified_base 16: mod_base = OTHER; note = 2'-fluoroguanosine
  modified_base 17: mod_base = um
  modified_base 18: mod_base = OTHER; note = 2'-O-methyladenosine
  modified_base 19: mod_base = OTHER; note = 2'-O-methyladenosine
  modified_base 20: mod_base = OTHER; note = 2'-O-methyladenosine
  modified_base 21: mod_base = OTHER; note = 2'-O-methyluridine with a 3'-phosphorothioate linkage
  modified_base 22: mod_base = OTHER; note = 2'-O-methyladenosine with a 3'-phosphorothioate linkage
  modified_base 23: mod_base = um
tttctggaactggaagtaaatat

SEQ ID NO: 1937 - RNA, 23 nt, synthetic construct
  source 1..23: mol_type = other RNA
  modified_base 1: mod_base = OTHER; note = 2'-O-methyluridine with a 3'-phosphorothioate linkage
  modified_base 2: mod_base = OTHER; note = 2'-fluoroadenosine with a 3'-phosphorothioate linkage
  modified_base 3: mod_base = OTHER; note = 2'-O-methyladenosine
  modified_base 4: mod_base = OTHER; note = 2'-O-methyladenosine
  modified_base 5: mod_base = OTHER; note = 2'-fluoroadenosine
  modified_base 6: mod_base = OTHER; note = 2'-O-methyladenosine
  modified_base 7: mod_base = OTHER; note = 2'-fluoroguanosine
  modified_base 8: mod_base = gm
  modified_base 9: mod_base = gm
  modified_base 10: mod_base = cm
  modified_base 11: mod_base = OTHER; note = 2'-O-methyladenosine
  modified_base 12: mod_base = OTHER; note = 2'-O-methyladenosine
  modified_base 13: mod_base = OTHER; note = 2'-O-methyladenosine
  modified_base 14: mod_base = OTHER; note = 2'-fluoroguanosine
  modified_base 15: mod_base = cm
  modified_base 16: mod_base = OTHER; note = 2'-fluorouridine
  modified_base 17: mod_base = um
  modified_base 18: mod_base = cm
  modified_base 19: mod_base = OTHER; note = 2'-O-methyladenosine
  modified_base 20: mod_base = um
  modified_base 21: mod_base = OTHER; note = 2'-O-methyluridine with a 3'-phosphorothioate linkage
  modified_base 22: mod_base = OTHER; note = 2'-O-methylcytidine with a 3'-phosphorothioate linkage
  modified_base 23: mod_base = OTHER; note = 2'-O-methyladenosine
taaaaagggcaaagcttcattca

SEQ ID NO: 1938 - RNA, 23 nt, synthetic construct
  source 1..23: mol_type = other RNA
  modified_base 1: mod_base = OTHER; note = 2'-O-methyluridine with a 3'-phosphorothioate linkage
  modified_base 2: mod_base = OTHER; note = 2'-fluoroguanosine with a 3'-phosphorothioate linkage
  modified_base 3: mod_base = gm
  modified_base 4: mod_base = gm
  modified_base 5: mod_base = OTHER; note = 2'-fluorocytidine
  modified_base 6: mod_base = OTHER; note = 2'-O-methyladenosine
  modified_base 7: mod_base = OTHER; note = 2'-fluoroadenosine
  modified_base 8: mod_base = OTHER; note = 2'-O-methyladenosine
  modified_base 9: mod_base = cm
  modified_base 10: mod_base = um
  modified_base 11: mod_base = um
  modified_base 12: mod_base = um
  modified_base 13: mod_base = gm
  modified_base 14: mod_base = OTHER; note = 2'-fluorocytidine
  modified_base 15: mod_base = um
  modified_base 16: mod_base = OTHER; note = 2'-fluoroadenosine
  modified_base 17: mod_base = OTHER; note = 2'-O-methyladenosine
  modified_base 18: mod_base = um
  modified_base 19: mod_base = gm
  modified_base 20: mod_base = um
  modified_base 21: mod_base = OTHER; note = 2'-O-methylguanosine with a 3'-phosphorothioate linkage
  modified_base 22: mod_base = OTHER; note = 2'-O-methylcytidine with a 3'-phosphorothioate linkage
  modified_base 23: mod_base = um
tgggcaaactttgctaatgtgct

SEQ ID NO: 1939 - RNA, 23 nt, synthetic construct
  source 1..23: mol_type = other RNA
  modified_base 1: mod_base = OTHER; note = 2'-O-methyluridine with a 3'-phosphorothioate linkage
  modified_base 2: mod_base = OTHER; note = 2'-fluoroadenosine with a 3'-phosphorothioate linkage
  modified_base 3: mod_base = gm
  modified_base 4: mod_base = gm
  modified_base 5: mod_base = OTHER; note = 2'-fluoroguanosine
  modified_base 6: mod_base = cm
  modified_base 7: mod_base = OTHER; note = 2'-fluoroadenosine
  modified_base 8: mod_base = OTHER; note = 2'-O-methyladenosine
  modified_base 9: mod_base = OTHER; note = 2'-O-methyladenosine
  modified_base 10: mod_base = cm
  modified_base 11: mod_base = um
  modified_base 12: mod_base = um
  modified_base 13: mod_base = um
  modified_base 14: mod_base = OTHER; note = 2'-fluoroguanosine
  modified_base 15: mod_base = cm
  modified_base 16: mod_base = OTHER; note = 2'-fluorouridine
  modified_base 17: mod_base = OTHER; note = 2'-O-methyladenosine
  modified_base 18: mod_base = OTHER; note = 2'-O-methyladenosine
  modified_base 19: mod_base = um
  modified_base 20: mod_base = gm
  modified_base 21: mod_base = OTHER; note = 2'-O-methyluridine with a 3'-phosphorothioate linkage
  modified_base 22: mod_base = OTHER; note = 2'-O-methylguanosine with a 3'-phosphorothioate linkage
  modified_base 23: mod_base = cm
tagggcaaactttgctaatgtgc

SEQ ID NO: 1940 - RNA, 23 nt, synthetic construct
  source 1..23: mol_type = other RNA
  modified_base 1: mod_base = OTHER; note = 2'-O-methyluridine with a 3'-phosphorothioate linkage
  modified_base 2: mod_base = OTHER; note = 2'-fluoroguanosine with a 3'-phosphorothioate linkage
  modified_base 3: mod_base = OTHER; note = 2'-O-methyladenosine
  modified_base 4: mod_base = gm
  modified_base 5: mod_base = OTHER; note = 2'-fluoroguanosine
  modified_base 6: mod_base = gm
  modified_base 7: mod_base = OTHER; note = 2'-fluorocytidine
  modified_base 8: mod_base = OTHER; note = 2'-O-methyladenosine
  modified_base 9: mod_base = OTHER; note = 2'-O-methyladenosine
  modified_base 10: mod_base = OTHER; note = 2'-O-methyladenosine
  modified_base 11: mod_base = cm
  modified_base 12: mod_base = um
  modified_base 13: mod_base = um
  modified_base 14: mod_base = OTHER; note = 2'-fluorouridine
  modified_base 15: mod_base = gm
  modified_base 16: mod_base = OTHER; note = 2'-fluorocytidine
  modified_base 17: mod_base = um
  modified_base 18: mod_base = OTHER; note = 2'-O-methyladenosine
  modified_base 19: mod_base = OTHER; note = 2'-O-methyladenosine
  modified_base 20: mod_base = um
  modified_base 21: mod_base = OTHER; note = 2'-O-methylguanosine with a 3'-phosphorothioate linkage
  modified_base 22: mod_base = OTHER; note = 2'-O-methyluridine with a 3'-phosphorothioate linkage
  modified_base 23: mod_base = gm
tgagggcaaactttgctaatgtg

SEQ ID NO: 1941 - RNA, 23 nt, synthetic construct
  source 1..23: mol_type = other RNA
  modified_base 1: mod_base = OTHER; note = 2'-O-methyluridine with a 3'-phosphorothioate linkage
  modified_base 2: mod_base = OTHER; note = 2'-fluoroadenosine with a 3'-phosphorothioate linkage
  modified_base 3: mod_base = cm
  modified_base 4: mod_base = um
  modified_base 5: mod_base = OTHER; note = 2'-fluoroguanosine
  modified_base 6: mod_base = OTHER; note = 2'-O-methyladenosine
  modified_base 7: mod_base = OTHER; note = 2'-fluoroguanosine
  modified_base 8: mod_base = gm
  modified_base 9: mod_base = gm
  modified_base 10: mod_base = cm
  modified_base 11: mod_base = OTHER; note = 2'-O-methyladenosine
  modified_base 12: mod_base = OTHER; note = 2'-O-methyladenosine
  modified_base 13: mod_base = OTHER; note = 2'-O-methyladenosine
  modified_base 14: mod_base = OTHER; note = 2'-fluorocytidine
  modified_base 15: mod_base = um
  modified_base 16: mod_base = OTHER; note = 2'-fluorouridine
  modified_base 17: mod_base = um
  modified_base 18: mod_base = gm
  modified_base 19: mod_base = cm
  modified_base 20: mod_base = um
  modified_base 21: mod_base = OTHER; note = 2'-O-methyladenosine with a 3'-phosphorothioate linkage
  modified_base 22: mod_base = OTHER; note = 2'-O-methyladenosine with a 3'-phosphorothioate linkage
  modified_base 23: mod_base = um
tactgagggcaaactttgctaat

SEQ ID NO: 1942 - RNA, 23 nt, synthetic construct
  source 1..23: mol_type = other RNA
  modified_base 1: mod_base = OTHER; note = 2'-O-methyluridine with a 3'-phosphorothioate linkage
  modified_base 2: mod_base = OTHER; note = 2'-fluoroguanosine with a 3'-phosphorothioate linkage
  modified_base 3: mod_base = OTHER; note = 2'-O-methyladenosine
  modified_base 4: mod_base = OTHER; note = 2'-O-methyladenosine
  modified_base 5: mod_base = OTHER; note = 2'-fluorocytidine
  modified_base 6: mod_base = um
  modified_base 7: mod_base = OTHER; note = 2'-fluoroguanosine
  modified_base 8: mod_base = OTHER; note = 2'-O-methyladenosine
  modified_base 9: mod_base = gm
  modified_base 10: mod_base = gm
  modified_base 11: mod_base = gm
  modified_base 12: mod_base = cm
  modified_base 13: mod_base = OTHER; note = 2'-O-methyladenosine
  modified_base 14: mod_base = OTHER; note = 2'-fluoroadenosine
  modified_base 15: mod_base = OTHER; note = 2'-O-methyladenosine
  modified_base 16: mod_base = OTHER; note = 2'-fluorocytidine
  modified_base 17: mod_base = um
  modified_base 18: mod_base = um
  modified_base 19: mod_base = um
  modified_base 20: mod_base = gm
  modified_base 21: mod_base = OTHER; note = 2'-O-methylcytidine with a 3'-phosphorothioate linkage
  modified_base 22: mod_base = OTHER; note = 2'-O-methyluridine with a 3'-phosphorothioate linkage
  modified_base 23: mod_base = OTHER; note = 2'-O-methyladenosine
tgaactgagggcaaactttgcta

SEQ ID NO: 1943 - RNA, 23 nt, synthetic construct
  source 1..23: mol_type = other RNA
  modified_base 1: mod_base = OTHER; note = 2'-O-methyluridine with a 3'-phosphorothioate linkage
  modified_base 2: mod_base = OTHER; note = 2'-fluorocytidine with a 3'-phosphorothioate linkage
  modified_base 3: mod_base = cm
  modified_base 4: mod_base = um
  modified_base 5: mod_base = OTHER; note = 2'-fluorouridine
  modified_base 6: mod_base = OTHER; note = 2'-O-methyladenosine
  modified_base 7: mod_base = OTHER; note = 2'-fluorocytidine
  modified_base 8: mod_base = um
  modified_base 9: mod_base = um
  modified_base 10: mod_base = cm
  modified_base 11: mod_base = OTHER; note = 2'-O-methyladenosine
  modified_base 12: mod_base = um
  modified_base 13: mod_base = cm
  modified_base 14: mod_base = OTHER; note = 2'-fluorocytidine
  modified_base 15: mod_base = um
  modified_base 16: mod_base = OTHER; note = 2'-fluoroguanosine
  modified_base 17: mod_base = um
  modified_base 18: mod_base = gm
  modified_base 19: mod_base = OTHER; note = 2'-O-methyladenosine
  modified_base 20: mod_base = gm
  modified_base 21: mod_base = OTHER; note = 2'-O-methyluridine with a 3'-phosphorothioate linkage
  modified_base 22: mod_base = OTHER; note = 2'-O-methyluridine with a 3'-phosphorothioate linkage
  modified_base 23: mod_base = gm
tccttacttcatcctgtgagttg

SEQ ID NO: 1944 - RNA, 23 nt, synthetic construct
  source 1..23: mol_type = other RNA
  modified_base 1: mod_base = OTHER; note = 2'-O-methyluridine with a 3'-phosphorothioate linkage
  modified_base 2: mod_base = OTHER; note = 2'-fluorouridine with a 3'-phosphorothioate linkage
  modified_base 3: mod_base = um
  modified_base 4: mod_base = cm
  modified_base 5: mod_base = OTHER; note = 2'-fluorocytidine
  modified_base 6: mod_base = cm
  modified_base 7: mod_base = OTHER; note = 2'-fluorouridine
  modified_base 8: mod_base = um
  modified_base 9: mod_base = OTHER; note = 2'-O-methyladenosine
  modified_base 10: mod_base = cm
  modified_base 11: mod_base = um
  modified_base 12: mod_base = um
  modified_base 13: mod_base = cm
  modified_base 14: mod_base = OTHER; note = 2'-fluoroadenosine
  modified_base 15: mod_base = um
  modified_base 16: mod_base = OTHER; note = 2'-fluorocytidine
  modified_base 17: mod_base = cm
  modified_base 18: mod_base = um
  modified_base 19: mod_base = gm
  modified_base 20: mod_base = um
  modified_base 21: mod_base = OTHER; note = 2'-O-methylguanosine with a 3'-phosphorothioate linkage
  modified_base 22: mod_base = OTHER; note = 2'-O-methyladenosine with a 3'-phosphorothioate linkage
  modified_base 23: mod_base = gm
tttcccttacttcatcctgtgag

SEQ ID NO: 1945 - RNA, 23 nt, synthetic construct
  source 1..23: mol_type = other RNA
  modified_base 1: mod_base = OTHER; note = 2'-O-methyluridine with a 3'-phosphorothioate linkage
  modified_base 2: mod_base = OTHER; note = 2'-fluorouridine with a 3'-phosphorothioate linkage
  modified_base 3: mod_base = um
  modified_base 4: mod_base = um
  modified_base 5: mod_base = OTHER; note = 2'-fluorouridine
  modified_base 6: mod_base = cm
  modified_base 7: mod_base = OTHER; note = 2'-fluorocytidine
  modified_base 8: mod_base = cm
  modified_base 9: mod_base = um
  modified_base 10: mod_base = um
  modified_base 11: mod_base = OTHER; note = 2'-O-methyladenosine
  modified_base 12: mod_base = cm
  modified_base 13: mod_base = um
  modified_base 14: mod_base = OTHER; note = 2'-fluorouridine
  modified_base 15: mod_base = cm
  modified_base 16: mod_base = OTHER; note = 2'-fluoroadenosine
  modified_base 17: mod_base = um
  modified_base 18: mod_base = cm
  modified_base 19: mod_base = cm
  modified_base 20: mod_base = um
  modified_base 21: mod_base = OTHER; note = 2'-O-methylguanosine with a 3'-phosphorothioate linkage
  modified_base 22: mod_base = OTHER; note = 2'-O-methyluridine with a 3'-phosphorothioate linkage
  modified_base 23: mod_base = gm
tttttcccttacttcatcctgtg

SEQ ID NO: 1946 - RNA, 23 nt, synthetic construct
  source 1..23: mol_type = other RNA
  modified_base 1: mod_base = OTHER; note = 2'-O-methyluridine with a 3'-phosphorothioate linkage
  modified_base 2: mod_base = OTHER; note = 2'-fluoroadenosine with a 3'-phosphorothioate linkage
  modified_base 3: mod_base = um
  modified_base 4: mod_base = um
  modified_base 5: mod_base = OTHER; note = 2'-fluorouridine
  modified_base 6: mod_base = um
  modified_base 7: mod_base = OTHER; note = 2'-fluorocytidine
  modified_base 8: mod_base = cm
  modified_base 9: mod_base = cm
  modified_base 10: mod_base = um
  modified_base 11: mod_base = um
  modified_base 12: mod_base = OTHER; note = 2'-O-methyladenosine
  modified_base 13: mod_base = cm
  modified_base 14: mod_base = OTHER; note = 2'-fluorouridine
  modified_base 15: mod_base = um
  modified_base 16: mod_base = OTHER; note = 2'-fluorocytidine
  modified_base 17: mod_base = OTHER; note = 2'-O-methyladenosine
  modified_base 18: mod_base = um
  modified_base 19: mod_base = cm
  modified_base 20: mod_base = cm
  modified_base 21: mod_base = OTHER; note = 2'-O-methyluridine with a 3'-phosphorothioate linkage
  modified_base 22: mod_base = OTHER; note = 2'-O-methylguanosine with a 3'-phosphorothioate linkage
  modified_base 23: mod_base = um
tattttcccttacttcatcctgt

SEQ ID NO: 1947 - RNA, 23 nt, synthetic construct
  source 1..23: mol_type = other RNA
  modified_base 1: mod_base = OTHER; note = 2'-O-methyluridine with a 3'-phosphorothioate linkage
  modified_base 2: mod_base = OTHER; note = 2'-fluorocytidine with a 3'-phosphorothioate linkage
  modified_base 3: mod_base = cm
  modified_base 4: mod_base = OTHER; note = 2'-O-methyladenosine
  modified_base 5: mod_base = OTHER; note = 2'-fluoroadenosine
  modified_base 6: mod_base = OTHER; note = 2'-O-methyladenosine
  modified_base 7: mod_base = OTHER; note = 2'-fluorouridine
  modified_base 8: mod_base = um
  modified_base 9: mod_base = gm
  modified_base 10: mod_base = gm
  modified_base 11: mod_base = OTHER; note = 2'-O-methyladenosine
  modified_base 12: mod_base = cm
  modified_base 13: mod_base = gm
  modified_base 14: mod_base = OTHER; note = 2'-fluoroadenosine
  modified_base 15: mod_base = cm
  modified_base 16: mod_base = OTHER; note = 2'-fluorocytidine
  modified_base 17: mod_base = cm
  modified_base 18: mod_base = um
  modified_base 19: mod_base = cm
  modified_base 20: mod_base = gm
  modified_base 21: mod_base = OTHER; note = 2'-O-methylcytidine with a 3'-phosphorothioate linkage
  modified_base 22: mod_base = OTHER; note = 2'-O-methylguanosine with a 3'-phosphorothioate linkage
  modified_base 23: mod_base = gm
tccaaattggacgaccctcgcgg

SEQ ID NO: 1948 - RNA, 23 nt, synthetic construct
  source 1..23: mol_type = other RNA
  modified_base 1: mod_base = OTHER; note = 2'-O-methyluridine with a 3'-phosphorothioate linkage
  modified_base 2: mod_base = OTHER; note = 2'-fluoroguanosine with a 3'-phosphorothioate linkage
  modified_base 3: mod_base = cm
  modified_base 4: mod_base = cm
  modified_base 5: mod_base = OTHER; note = 2'-fluoroadenosine
  modified_base 6: mod_base = OTHER; note = 2'-O-methyladenosine
  modified_base 7: mod_base = OTHER; note = 2'-fluoroadenosine
  modified_base 8: mod_base = um
  modified_base 9: mod_base = um
  modified_base 10: mod_base = gm
  modified_base 11: mod_base = gm
  modified_base 12: mod_base = OTHER; note = 2'-O-methyladenosine
  modified_base 13: mod_base = cm
  modified_base 14: mod_base = OTHER; note = 2'-fluoroguanosine
  modified_base 15: mod_base = OTHER; note = 2'-O-methyladenosine
  modified_base 16: mod_base = OTHER; note = 2'-fluorocytidine
  modified_base 17: mod_base = cm
  modified_base 18: mod_base = cm
  modified_base 19: mod_base = um
  modified_base 20: mod_base = cm
  modified_base 21: mod_base = OTHER; note = 2'-O-methylguanosine with a 3'-phosphorothioate linkage
  modified_base 22: mod_base = OTHER; note = 2'-O-methylcytidine with a 3'-phosphorothioate linkage
  modified_base 23: mod_base = gm
tgccaaattggacgaccctcgcg

SEQ ID NO: 1949 - RNA, 23 nt, synthetic construct
  source 1..23: mol_type = other RNA
  modified_base 1: mod_base = OTHER; note = 2'-O-methyluridine with a 3'-phosphorothioate linkage
  modified_base 2: mod_base = OTHER; note = 2'-fluorouridine with a 3'-phosphorothioate linkage
  modified_base 3: mod_base = gm
  modified_base 4: mod_base = cm
  modified_base 5: mod_base = OTHER; note = 2'-fluorocytidine
  modified_base 6: mod_base = OTHER; note = 2'-O-methyladenosine
  modified_base 7: mod_base = OTHER; note = 2'-fluoroadenosine
  modified_base 8: mod_base = OTHER; note = 2'-O-methyladenosine
  modified_base 9: mod_base = um
  modified_base 10: mod_base = um
  modified_base 11: mod_base = gm
  modified_base 12: mod_base = gm
  modified_base 13: mod_base = OTHER; note = 2'-O-methyladenosine
  modified_base 14: mod_base = OTHER; note = 2'-fluorocytidine
  modified_base 15: mod_base = gm
  modified_base 16: mod_base = OTHER; note = 2'-fluoroadenosine
  modified_base 17: mod_base = cm
  modified_base 18: mod_base = cm
  modified_base 19: mod_base = cm
  modified_base 20: mod_base = um
  modified_base 21: mod_base = OTHER; note = 2'-O-methylcytidine with a 3'-phosphorothioate linkage
  modified_base 22: mod_base = OTHER; note = 2'-O-methylguanosine with a 3'-phosphorothioate linkage
  modified_base 23: mod_base = cm
ttgccaaattggacgaccctcgc

SEQ ID NO: 1950 - RNA, 23 nt, synthetic construct
  source 1..23: mol_type = other RNA
  modified_base 1: mod_base = OTHER; note = 2'-O-methyluridine with a 3'-phosphorothioate linkage
  modified_base 2: mod_base = OTHER; note = 2'-fluoroguanosine with a 3'-phosphorothioate linkage
  modified_base 3: mod_base = OTHER; note = 2'-O-methyladenosine
  modified_base 4: mod_base = gm
  modified_base 5: mod_base = OTHER; note = 2'-fluorocytidine
  modified_base 6: mod_base = um
  modified_base 7: mod_base = OTHER; note = 2'-fluoroguanosine
  modified_base 8: mod_base = cm
  modified_base 9: mod_base = cm
  modified_base 10: mod_base = OTHER; note = 2'-O-methyladenosine
  modified_base 11: mod_base = OTHER; note = 2'-O-methyladenosine
  modified_base 12: mod_base = OTHER; note = 2'-O-methyladenosine
  modified_base 13: mod_base = um
  modified_base 14: mod_base = OTHER; note = 2'-fluorouridine
  modified_base 15: mod_base = gm
  modified_base 16: mod_base = OTHER; note = 2'-fluoroguanosine
  modified_base 17: mod_base = OTHER; note = 2'-O-methyladenosine
  modified_base 18: mod_base = cm
  modified_base 19: mod_base = gm
  modified_base 20: mod_base = OTHER; note = 2'-O-methyladenosine
  modified_base 21: mod_base = OTHER; note = 2'-O-methylcytidine with a 3'-phosphorothioate linkage
  modified_base 22: mod_base = OTHER; note = 2'-O-methylcytidine with a 3'-phosphorothioate linkage
  modified_base 23: mod_base = cm
tgagctgccaaattggacgaccc

SEQ ID NO: 1951 - RNA, 23 nt, synthetic construct
  source 1..23: mol_type = other RNA
  modified_base 1: mod_base = OTHER; note = 2'-O-methyluridine with a 3'-phosphorothioate linkage
  modified_base 2: mod_base = OTHER; note = 2'-fluorouridine with a 3'-phosphorothioate linkage
  modified_base 3: mod_base = gm
  modified_base 4: mod_base = OTHER; note = 2'-O-methyladenosine
  modified_base 5: mod_base = OTHER; note = 2'-fluoroguanosine
  modified_base 6: mod_base = cm
  modified_base 7: mod_base = OTHER; note = 2'-fluorouridine
  modified_base 8: mod_base = gm
  modified_base 9: mod_base = cm
  modified_base 10: mod_base = cm
  modified_base 11: mod_base = OTHER; note = 2'-O-methyladenosine
  modified_base 12: mod_base = OTHER; note = 2'-O-methyladenosine
  modified_base 13: mod_base = OTHER; note = 2'-O-methyladenosine
  modified_base 14: mod_base = OTHER; note = 2'-fluorouridine
  modified_base 15: mod_base = um
  modified_base 16: mod_base = OTHER; note = 2'-fluoroguanosine
  modified_base 17: mod_base = gm
  modified_base 18: mod_base = OTHER; note = 2'-O-methyladenosine
  modified_base 19: mod_base = cm
  modified_base 20: mod_base = gm
  modified_base 21: mod_base = OTHER; note = 2'-O-methyladenosine with a 3'-phosphorothioate linkage
  modified_base 22: mod_base = OTHER; note = 2'-O-methylcytidine with a 3'-phosphorothioate linkage
  modified_base 23: mod_base = cm
ttgagctgccaaattggacgacc

SEQ ID NO: 1952 - RNA, 23 nt, synthetic construct
  source 1..23: mol_type = other RNA
  modified_base 1: mod_base = OTHER; note = 2'-O-methyluridine with a 3'-phosphorothioate linkage
  modified_base 2: mod_base = OTHER; note = 2'-fluorocytidine with a 3'-phosphorothioate linkage
  modified_base 3: mod_base = um
  modified_base 4: mod_base = gm
  modified_base 5: mod_base = OTHER; note = 2'-fluoroadenosine
  modified_base 6: mod_base = gm
  modified_base 7: mod_base = OTHER; note = 2'-fluorocytidine
  modified_base 8: mod_base = um
  modified_base 9: mod_base = gm
  modified_base 10: mod_base = cm
  modified_base 11: mod_base = cm
  modified_base 12: mod_base = OTHER; note = 2'-O-methyladenosine
  modified_base 13: mod_base = OTHER; note = 2'-O-methyladenosine
  modified_base 14: mod_base = OTHER; note = 2'-fluoroadenosine
  modified_base 15: mod_base = um
  modified_base 16: mod_base = OTHER; note = 2'-fluorouridine
  modified_base 17: mod_base = gm
  modified_base 18: mod_base = gm
  modified_base 19: mod_base = OTHER; note = 2'-O-methyladenosine
  modified_base 20: mod_base = cm
  modified_base 21: mod_base = OTHER; note = 2'-O-methylguanosine with a 3'-phosphorothioate linkage
  modified_base 22: mod_base = OTHER; note = 2'-O-methyladenosine with a 3'-phosphorothioate linkage
  modified_base 23: mod_base = cm
tctgagctgccaaattggacgac

SEQ ID NO: 1953 - RNA, 23 nt, synthetic construct
  source 1..23: mol_type = other RNA
  modified_base 1: mod_base = OTHER; note = 2'-O-methyluridine with a 3'-phosphorothioate linkage
  modified_base 2: mod_base = OTHER; note = 2'-fluoroguanosine with a 3'-phosphorothioate linkage
  modified_base 3: mod_base = gm
  modified_base 4: mod_base = cm
  modified_base 5: mod_base = OTHER; note = 2'-fluorouridine
  modified_base 6: mod_base = gm
  modified_base 7: mod_base = OTHER; note = 2'-fluoroadenosine
  modified_base 8: mod_base = gm
  modified_base 9: mod_base = cm
  modified_base 10: mod_base = um
  modified_base 11: mod_base = gm
  modified_base 12: mod_base = cm
  modified_base 13: mod_base = cm
  modified_base 14: mod_base = OTHER; note = 2'-fluoroadenosine
  modified_base 15: mod_base = OTHER; note = 2'-O-methyladenosine
  modified_base 16: mod_base = OTHER; note = 2'-fluoroadenosine
  modified_base 17: mod_base = um
  modified_base 18: mod_base = um
  modified_base 19: mod_base = gm
  modified_base 20: mod_base = gm
  modified_base 21: mod_base = OTHER; note = 2'-O-methyladenosine with a 3'-phosphorothioate linkage
  modified_base 22: mod_base = OTHER; note = 2'-O-methylcytidine with a 3'-phosphorothioate linkage
  modified_base 23: mod_base = gm
tggctgagctgccaaattggacg

SEQ ID NO: 1954 - RNA, 23 nt, synthetic construct
  source 1..23: mol_type = other RNA
  modified_base 1: mod_base = OTHER; note = 2'-O-methyluridine with a 3'-phosphorothioate linkage
  modified_base 2: mod_base = OTHER; note = 2'-fluoroadenosine with a 3'-phosphorothioate linkage
  modified_base 3: mod_base = OTHER; note = 2'-O-methyladenosine
  modified_base 4: mod_base = um
  modified_base 5: mod_base = OTHER; note = 2'-fluoroguanosine
  modified_base 6: mod_base = gm
  modified_base 7: mod_base = OTHER; note = 2'-fluorocytidine
  modified_base 8: mod_base = um
  modified_base 9: mod_base = gm
  modified_base 10: mod_base = OTHER; note = 2'-O-methyladenosine
  modified_base 11: mod_base = gm
  modified_base 12: mod_base = cm
  modified_base 13: mod_base = um
  modified_base 14: mod_base = OTHER; note = 2'-fluoroguanosine
  modified_base 15: mod_base = cm
  modified_base 16: mod_base = OTHER; note = 2'-fluorocytidine
  modified_base 17: mod_base = OTHER; note = 2'-O-methyladenosine
  modified_base 18: mod_base = OTHER; note = 2'-O-methyladenosine
  modified_base 19: mod_base = OTHER; note = 2'-O-methyladenosine
  modified_base 20: mod_base = um
  modified_base 21: mod_base = OTHER; note = 2'-O-methyluridine with a 3'-phosphorothioate linkage
  modified_base 22: mod_base = OTHER; note = 2'-O-methylguanosine with a 3'-phosphorothioate linkage
  modified_base 23: mod_base = gm
taatggctgagctgccaaattgg

SEQ ID NO: 1955 - RNA, 23 nt, synthetic construct
  source 1..23: mol_type = other RNA
  modified_base 1: mod_base = OTHER; note = 2'-O-methyluridine with a 3'-phosphorothioate linkage
  modified_base 2: mod_base = OTHER; note = 2'-fluorocytidine with a 3'-phosphorothioate linkage
  modified_base 3: mod_base = OTHER; note = 2'-O-methyladenosine
  modified_base 4: mod_base = OTHER; note = 2'-O-methyladenosine
  modified_base 5: mod_base = OTHER; note = 2'-fluoroadenosine
  modified_base 6: mod_base = OTHER; note = 2'-O-methyladenosine
  modified_base 7: mod_base = OTHER; note = 2'-fluorouridine
  modified_base 8: mod_base = gm
  modified_base 9: mod_base = gm
  modified_base 10: mod_base = cm
  modified_base 11: mod_base = um
  modified_base 12: mod_base = gm
  modified_base 13: mod_base = OTHER; note = 2'-O-methyladenosine
  modified_base 14: mod_base = OTHER; note = 2'-fluoroguanosine
  modified_base 15: mod_base = cm
  modified_base 16: mod_base = OTHER; note = 2'-fluorouridine
  modified_base 17: mod_base = gm
  modified_base 18: mod_base = cm
  modified_base 19: mod_base = cm
  modified_base 20: mod_base = OTHER; note = 2'-O-methyladenosine
  modified_base 21: mod_base = OTHER; note = 2'-O-methyladenosine with a 3'-phosphorothioate linkage
  modified_base 22: mod_base = OTHER; note = 2'-O-methyladenosine with a 3'-phosphorothioate linkage
  modified_base 23: mod_base = um
tcaaaatggctgagctgccaaat

SEQ ID NO: 1956 - RNA, 23 nt, synthetic construct
  source 1..23: mol_type = other RNA
  modified_base 1: mod_base = OTHER; note = 2'-O-methyluridine with a 3'-phosphorothioate linkage
  modified_base 2: mod_base = OTHER; note = 2'-fluoroguanosine with a 3'-phosphorothioate linkage
  modified_base 3: mod_base = cm
  modified_base 4: mod_base = OTHER; note = 2'-O-methyladenosine
  modified_base 5: mod_base = OTHER; note = 2'-fluoroadenosine
  modified_base 6: mod_base = OTHER; note = 2'-O-methyladenosine
  modified_base 7: mod_base = OTHER; note = 2'-fluoroadenosine
  modified_base 8: mod_base = um
  modified_base 9: mod_base = gm
  modified_base 10: mod_base = gm
  modified_base 11: mod_base = cm
  modified_base 12: mod_base = um
  modified_base 13: mod_base = gm
  modified_base 14: mod_base = OTHER; note = 2'-fluoroadenosine
  modified_base 15: mod_base = gm
  modified_base 16: mod_base = OTHER; note = 2'-fluorocytidine
  modified_base 17: mod_base = um
  modified_base 18: mod_base = gm
  modified_base 19: mod_base = cm
  modified_base 20: mod_base = cm
  modified_base 21: mod_base = OTHER; note = 2'-O-methyladenosine with a 3'-phosphorothioate linkage
  modified_base 22: mod_base = OTHER; note = 2'-O-methyladenosine with a 3'-phosphorothioate linkage
  modified_base 23: mod_base = OTHER; note = 2'-O-methyladenosine
tgcaaaatggctgagctgccaaa

SEQ ID NO: 1957 - RNA, 23 nt, synthetic construct
  source 1..23: mol_type = other RNA
  modified_base 1: mod_base = OTHER; note = 2'-O-methyluridine with a 3'-phosphorothioate linkage
  modified_base 2: mod_base = OTHER; note = 2'-fluorocytidine with a 3'-phosphorothioate linkage
  modified_base 3: mod_base = um
  modified_base 4: mod_base = um
  modified_base 5: mod_base = OTHER; note = 2'-fluorocytidine
  modified_base 6: mod_base = um
  modified_base 7: mod_base = OTHER; note = 2'-fluorouridine
  modified_base 8: mod_base = cm
  modified_base 9: mod_base = um
  modified_base 10: mod_base = um
  modified_base 11: mod_base = cm
  modified_base 12: mod_base = um
  modified_base 13: mod_base = OTHER; note = 2'-O-methyladenosine
  modified_base 14: mod_base = OTHER; note = 2'-fluoroadenosine
  modified_base 15: mod_base = OTHER; note = 2'-O-methyladenosine
  modified_base 16: mod_base = OTHER; note = 2'-fluoroadenosine
  modified_base 17: mod_base = cm
  modified_base 18: mod_base = um
  modified_base 19: mod_base = cm
  modified_base 20: mod_base = gm
  modified_base 21: mod_base = OTHER; note = 2'-O-methylguanosine with a 3'-phosphorothioate linkage
  modified_base 22: mod_base = OTHER; note = 2'-O-methylguanosine with a 3'-phosphorothioate linkage
  modified_base 23: mod_base = cm
tcttcttcttctaaaactcgggc

SEQ ID NO: 1958 - RNA, 23 nt, synthetic construct
  source 1..23: mol_type = other RNA
  modified_base 1: mod_base = OTHER; note = 2'-O-methyluridine with a 3'-phosphorothioate linkage
  modified_base 2: mod_base = OTHER; note = 2'-fluorocytidine with a 3'-phosphorothioate linkage
  modified_base 3: mod_base = OTHER; note = 2'-O-methyladenosine
  modified_base 4: mod_base = um
  modified_base 5: mod_base = OTHER; note = 2'-fluoroadenosine
  modified_base 6: mod_base = OTHER; note = 2'-O-methyladenosine
  modified_base 7: mod_base = OTHER; note = 2'-fluorouridine
  modified_base 8: mod_base = cm
  modified_base 9: mod_base = OTHER; note = 2'-O-methyladenosine
  modified_base 10: mod_base = um
  modified_base 11: mod_base = cm
  modified_base 12: mod_base = um
  modified_base 13: mod_base = um
  modified_base 14: mod_base = OTHER; note = 2'-fluoroguanosine
  modified_base 15: mod_base = OTHER; note = 2'-O-methyladenosine
  modified_base 16: mod_base = OTHER; note = 2'-fluorocytidine
  modified_base 17: mod_base = cm
  modified_base 18: mod_base = cm
  modified_base 19: mod_base = um
  modified_base 20: mod_base = cm
  modified_base 21: mod_base = OTHER; note = 2'-O-methyluridine with a 3'-phosphorothioate linkage
  modified_base 22: mod_base = OTHER; note = 2'-O-methylguanosine with a 3'-phosphorothioate linkage
  modified_base 23: mod_base = OTHER; note = 2'-O-methyladenosine
tcataatcatcttgaccctctga

SEQ ID NO: 1959 - RNA, 23 nt, synthetic construct
  source 1..23: mol_type = other RNA
  modified_base 1: mod_base = OTHER; note = 2'-O-methyluridine with a 3'-phosphorothioate linkage
  modified_base 2: mod_base = OTHER; note = 2'-fluoroadenosine with a 3'-phosphorothioate linkage
  modified_base 3: mod_base = gm
  modified_base 4: mod_base = OTHER; note = 2'-O-methyladenosine
  modified_base 5: mod_base = OTHER; note = 2'-fluorocytidine
  modified_base 6: mod_base = OTHER; note = 2'-O-methyladenosine
  modified_base 7: mod_base = OTHER; note = 2'-fluorouridine
  modified_base 8: mod_base = OTHER; note = 2'-O-methyladenosine
  modified_base 9: mod_base = OTHER; note = 2'-O-methyladenosine
  modified_base 10: mod_base = um
  modified_base 11: mod_base = cm
  modified_base 12: mod_base = OTHER; note = 2'-O-methyladenosine
  modified_base 13: mod_base = um
  modified_base 14: mod_base = OTHER; note = 2'-fluorocytidine
  modified_base 15: mod_base = um
  modified_base 16: mod_base = OTHER; note = 2'-fluorouridine
  modified_base 17: mod_base = gm
  modified_base 18: mod_base = OTHER; note = 2'-O-methyladenosine
  modified_base 19: mod_base = cm
  modified_base 20: mod_base = cm
  modified_base 21: mod_base = OTHER; note = 2'-O-methylcytidine with a 3'-phosphorothioate linkage
  modified_base 22: mod_base = OTHER; note = 2'-O-methyluridine with a 3'-phosphorothioate linkage
  modified_base 23: mod_base = cm
tagacataatcatcttgaccctc

SEQ ID NO: 1960 - RNA, 23 nt, synthetic construct
  source 1..23: mol_type = other RNA
  modified_base 1: mod_base = OTHER; note = 2'-O-methyluridine with a 3'-phosphorothioate linkage
  modified_base 2: mod_base = OTHER; note = 2'-fluoroguanosine with a 3'-phosphorothioate linkage
  modified_base 3: mod_base = gm
  modified_base 4: mod_base = OTHER; note = 2'-O-methyladenosine
  modified_base 5: mod_base = OTHER; note = 2'-fluorouridine
  modified_base 6: mod_base = cm
  modified_base 7: mod_base = OTHER; note = 2'-fluoroadenosine
  modified_base 8: mod_base = gm
  modified_base 9: mod_base = cm
  modified_base 10: mod_base = um
  modified_base 11: mod_base = OTHER; note = 2'-O-methyladenosine
  modified_base 12: mod_base = um
  modified_base 13: mod_base = cm
  modified_base 14: mod_base = OTHER; note = 2'-fluorocytidine
  modified_base 15: mod_base = OTHER; note = 2'-O-methyladenosine
  modified_base 16: mod_base = OTHER; note = 2'-fluoroguanosine
  modified_base 17: mod_base = cm
  modified_base 18: mod_base = gm
  modified_base 19: mod_base = OTHER; note = 2'-O-methyladenosine
  modified_base 20: mod_base = cm
  modified_base 21: mod_base = OTHER; note = 2'-O-methyluridine with a 3'-phosphorothioate linkage
  modified_base 22: mod_base = OTHER; note = 2'-O-methylguanosine with a 3'-phosphorothioate linkage
  modified_base 23: mod_base = um
tggatcagctatccagcgactgt

SEQ ID NO: 1961 - RNA, 23 nt, synthetic construct
  source 1..23: mol_type = other RNA
  modified_base 1: mod_base = OTHER; note = 2'-O-methyluridine with a 3'-phosphorothioate linkage
  modified_base 2: mod_base = OTHER; note = 2'-fluoroadenosine with a 3'-phosphorothioate linkage
  modified_base 3: mod_base = gm
  modified_base 4: mod_base = gm
  modified_base 5: mod_base = OTHER; note = 2'-fluoroadenosine
  modified_base 6: mod_base = um
  modified_base 7: mod_base = OTHER; note = 2'-fluorocytidine
  modified_base 8: mod_base = OTHER; note = 2'-O-methyladenosine
  modified_base 9: mod_base = gm
  modified_base 10: mod_base = cm
  modified_base 11: mod_base = um
  modified_base 12: mod_base = OTHER; note = 2'-O-methyladenosine
  modified_base 13: mod_base = um
  modified_base 14: mod_base = OTHER; note = 2'-fluorocytidine
  modified_base 15: mod_base = cm
  modified_base 16: mod_base = OTHER; note = 2'-fluoroadenosine
  modified_base 17: mod_base = gm
  modified_base 18: mod_base = cm
  modified_base 19: mod_base = gm
  modified_base 20: mod_base = OTHER; note = 2'-O-methyladenosine
  modified_base 21: mod_base = OTHER; note = 2'-O-methylcytidine with a 3'-phosphorothioate linkage
  modified_base 22: mod_base = OTHER; note = 2'-O-methyluridine with a 3'-phosphorothioate linkage
  modified_base 23: mod_base = gm
taggatcagctatccagcgactg

SEQ ID NO: 1962 - RNA, 23 nt, synthetic construct
  source 1..23: mol_type = other RNA
  modified_base 1: mod_base = OTHER; note = 2'-O-methyluridine with a 3'-phosphorothioate linkage
  modified_base 2: mod_base = OTHER; note = 2'-fluoroadenosine with a 3'-phosphorothioate linkage
  modified_base 3: mod_base = OTHER; note = 2'-O-methyladenosine
  modified_base 4: mod_base = gm
  modified_base 5: mod_base = OTHER; note = 2'-fluoroguanosine
  modified_base 6: mod_base = OTHER; note = 2'-O-methyladenosine
  modified_base 7: mod_base = OTHER; note = 2'-fluorouridine
  modified_base 8: mod_base = cm
  modified_base 9: mod_base = OTHER; note = 2'-O-methyladenosine
  modified_base 10: mod_base = gm
  modified_base 11: mod_base = cm
  modified_base 12: mod_base = um
  modified_base 13: mod_base = OTHER; note = 2'-O-methyladenosine
  modified_base 14: mod_base = OTHER; note = 2'-fluorouridine
  modified_base 15: mod_base = cm
  modified_base 16: mod_base = OTHER; note = 2'-fluorocytidine
  modified_base 17: mod_base = OTHER; note = 2'-O-methyladenosine
  modified_base 18: mod_base = gm
  modified_base 19: mod_base = cm
  modified_base 20: mod_base = gm
  modified_base 21: mod_base = OTHER; note = 2'-O-methyladenosine with a 3'-phosphorothioate linkage
  modified_base 22: mod_base = OTHER; note = 2'-O-methylcytidine with a 3'-phosphorothioate linkage
  modified_base 23: mod_base = um
taaggatcagctatccagcgact

SEQ ID NO: 1963 - RNA, 23 nt, synthetic construct
  source 1..23: mol_type = other RNA
  modified_base 1: mod_base = OTHER; note = 2'-O-methyluridine with a 3'-phosphorothioate linkage
  modified_base 2: mod_base = OTHER; note = 2'-fluoroguanosine with a 3'-phosphorothioate linkage
  modified_base 3: mod_base = um
  modified_base 4: mod_base = um
  modified_base 5: mod_base = OTHER; note = 2'-fluorouridine
  modified_base 6: mod_base = um
  modified_base 7: mod_base = OTHER; note = 2'-fluoroadenosine
  modified_base 8: mod_base = um
  modified_base 9: mod_base = OTHER; note = 2'-O-methyladenosine
  modified_base 10: mod_base = OTHER; note = 2'-O-methyladenosine
  modified_base 11: mod_base = cm
  modified_base 12: mod_base = cm
  modified_base 13: mod_base = um
  modified_base 14: mod_base = OTHER; note = 2'-fluorocytidine
  modified_base 15: mod_base = OTHER; note = 2'-O-methyladenosine
  modified_base 16: mod_base = OTHER; note = 2'-fluoroadenosine
  modified_base 17: mod_base = cm
  modified_base 18: mod_base = um
  modified_base 19: mod_base = um
  modified_base 20: mod_base = um
  modified_base 21: mod_base = OTHER; note = 2'-O-methyluridine with a 3'-phosphorothioate linkage
  modified_base 22: mod_base = OTHER; note = 2'-O-methylcytidine with a 3'-phosphorothioate linkage
  modified_base 23: mod_base = um
tgttttataacctcaacttttct

SEQ ID NO: 1964 - RNA, 23 nt, synthetic construct
  source 1..23: mol_type = other RNA
  modified_base 1: mod_base = OTHER; note = 2'-O-methyluridine with a 3'-phosphorothioate linkage
  modified_base 2: mod_base = OTHER; note = 2'-fluoroguanosine with a 3'-phosphorothioate linkage
  modified_base 3: mod_base = gm
  modified_base 4: mod_base = um
  modified_base 5: mod_base = OTHER; note = 2'-fluorouridine
  modified_base 6: mod_base = um
  modified_base 7: mod_base = OTHER; note = 2'-fluorouridine
  modified_base 8: mod_base = OTHER; note = 2'-O-methyladenosine
  modified_base 9: mod_base = um
  modified_base 10: mod_base = OTHER; note = 2'-O-methyladenosine
  modified_base 11: mod_base = OTHER; note = 2'-O-methyladenosine
  modified_base 12: mod_base = cm
  modified_base 13: mod_base = cm
  modified_base 14: mod_base = OTHER; note = 2'-fluorouridine
  modified_base 15: mod_base = cm
  modified_base 16: mod_base = OTHER; note = 2'-fluoroadenosine
  modified_base 17: mod_base = OTHER; note = 2'-O-methyladenosine
  modified_base 18: mod_base = cm
  modified_base 19: mod_base = um
  modified_base 20: mod_base = um
  modified_base 21: mod_base = OTHER; note = 2'-O-methyluridine with a 3'-phosphorothioate linkage
  modified_base 22: mod_base = OTHER; note = 2'-O-methyluridine with a 3'-phosphorothioate linkage
  modified_base 23: mod_base = cm
tggttttataacctcaacttttc

SEQ ID NO: 1965 - RNA, 23 nt, synthetic construct
  source 1..23: mol_type = other RNA
  modified_base 1: mod_base = OTHER; note = 2'-O-methyluridine with a 3'-phosphorothioate linkage
  modified_base 2: mod_base = OTHER; note = 2'-fluorocytidine with a 3'-phosphorothioate linkage
  modified_base 3: mod_base = OTHER; note = 2'-O-methyladenosine
  modified_base 4: mod_base = gm
  modified_base 5: mod_base = OTHER; note = 2'-fluoroguanosine
  modified_base 6: mod_base = gm
  modified_base 7: mod_base = OTHER; note = 2'-fluoroadenosine
  modified_base 8: mod_base = um
  modified_base 9: mod_base = gm
  modified_base 10: mod_base = gm
  modified_base 11: mod_base = gm
  modified_base 12: mod_base = cm
  modified_base 13: mod_base = OTHER; note = 2'-O-methyladenosine
  modified_base 14: mod_base = OTHER; note = 2'-fluorouridine
  modified_base 15: mod_base = OTHER; note = 2'-O-methyladenosine
  modified_base 16: mod_base = OTHER; note = 2'-fluorouridine
  modified_base 17: mod_base = OTHER; note = 2'-O-methyladenosine
  modified_base 18: mod_base = um
  modified_base 19: mod_base = cm
  modified_base 20: mod_base = cm
  modified_base 21: mod_base = OTHER; note = 2'-O-methyladenosine with a 3'-phosphorothioate linkage
  modified_base 22: mod_base = OTHER; note = 2'-O-methyladenosine with a 3'-phosphorothioate linkage
  modified_base 23: mod_base = um
tcagggatgggcatatatccaat

SEQ ID NO: 1966 - RNA, 23 nt, synthetic construct
  source 1..23: mol_type = other RNA
  modified_base 1: mod_base = OTHER; note = 2'-O-methyluridine with a 3'-phosphorothioate linkage
  modified_base 2: mod_base = OTHER; note = 2'-fluoroadenosine with a 3'-phosphorothioate linkage
  modified_base 3: mod_base = cm
  modified_base 4: mod_base = OTHER; note = 2'-O-methyladenosine
  modified_base 5: mod_base = OTHER; note = 2'-fluoroguanosine
  modified_base 6: mod_base = gm
  modified_base 7: mod_base = OTHER; note = 2'-fluoroguanosine
  modified_base 8: mod_base = OTHER; note = 2'-O-methyladenosine
  modified_base 9: mod_base = um
  modified_base 10: mod_base = gm
  modified_base 11: mod_base = gm
  modified_base 12: mod_base = gm
  modified_base 13: mod_base = cm
  modified_base 14: mod_base = OTHER; note = 2'-fluoroadenosine
  modified_base 15: mod_base = um
  modified_base 16: mod_base = OTHER; note = 2'-fluoroadenosine
  modified_base 17: mod_base = um
  modified_base 18: mod_base = OTHER; note = 2'-O-methyladenosine
  modified_base 19: mod_base = um
  modified_base 20: mod_base = cm
  modified_base 21: mod_base = OTHER; note = 2'-O-methylcytidine with a 3'-phosphorothioate linkage
  modified_base 22: mod_base = OTHER; note = 2'-O-methyladenosine with a 3'-phosphorothioate linkage
  modified_base 23: mod_base = OTHER; note = 2'-O-methyladenosine
tacagggatgggcatatatccaa

SEQ ID NO: 1967 - RNA, 23 nt, synthetic construct
  source 1..23: mol_type = other RNA
  modified_base 1: mod_base = OTHER; note = 2'-O-methyluridine with a 3'-phosphorothioate linkage
  modified_base 2: mod_base = OTHER; note = 2'-fluorocytidine with a 3'-phosphorothioate linkage
  modified_base 3: mod_base = OTHER; note = 2'-O-methyladenosine
  modified_base 4: mod_base = OTHER; note = 2'-O-methyladenosine
  modified_base 5: mod_base = OTHER; note = 2'-fluorocytidine
  modified_base 6: mod_base = OTHER; note = 2'-O-methyladenosine
  modified_base 7: mod_base = OTHER; note = 2'-fluoroguanosine
  modified_base 8: mod_base = gm
  modified_base 9: mod_base = gm
  modified_base 10: mod_base = OTHER; note = 2'-O-methyladenosine
  modified_base 11: mod_base = um
  modified_base 12: mod_base = gm
  modified_base 13: mod_base = gm
  modified_base 14: mod_base = OTHER; note = 2'-fluoroguanosine
  modified_base 15: mod_base = cm
  modified_base 16: mod_base = OTHER; note = 2'-fluoroadenosine
  modified_base 17: mod_base = um
  modified_base 18: mod_base = OTHER; note = 2'-O-methyladenosine
  modified_base 19: mod_base = um
  modified_base 20: mod_base = OTHER; note = 2'-O-methyladenosine
  modified_base 21: mod_base = OTHER; note = 2'-O-methyluridine with a 3'-phosphorothioate linkage
  modified_base 22: mod_base = OTHER; note = 2'-O-methylcytidine with a 3'-phosphorothioate linkage
  modified_base 23: mod_base = cm
tcaacagggatgggcatatatcc

SEQ ID NO: 1968 - RNA, 23 nt, synthetic construct
  source 1..23: mol_type = other RNA
  modified_base 1: mod_base = OTHER; note = 2'-O-methyluridine with a 3'-phosphorothioate linkage
  modified_base 2: mod_base = OTHER; note = 2'-fluorocytidine with a 3'-phosphorothioate linkage
  modified_base 3: mod_base = cm
  modified_base 4: mod_base = OTHER; note = 2'-O-methyladenosine
  modified_base 5: mod_base = OTHER; note = 2'-fluoroadenosine
  modified_base 6: mod_base = cm
  modified_base 7: mod_base = OTHER; note = 2'-fluoroadenosine
  modified_base 8: mod_base = gm
  modified_base 9: mod_base = gm
  modified_base 10: mod_base = gm
  modified_base 11: mod_base = OTHER; note = 2'-O-methyladenosine
  modified_base 12: mod_base = um
  modified_base 13: mod_base = gm
  modified_base 14: mod_base = OTHER; note = 2'-fluoroguanosine
  modified_base 15: mod_base = gm
  modified_base 16: mod_base = OTHER; note = 2'-fluorocytidine
  modified_base 17: mod_base = OTHER; note = 2'-O-methyladenosine
  modified_base 18: mod_base = um
  modified_base 19: mod_base = OTHER; note = 2'-O-methyladenosine
  modified_base 20: mod_base = um
  modified_base 21: mod_base = OTHER; note = 2'-O-methyladenosine with a 3'-phosphorothioate linkage
  modified_base 22: mod_base = OTHER; note = 2'-O-methyluridine with a 3'-phosphorothioate linkage
  modified_base 23: mod_base = cm
tccaacagggatgggcatatatc

SEQ ID NO: 1969 - RNA, 23 nt, synthetic construct
  source 1..23: mol_type = other RNA
  modified_base 1: mod_base = OTHER; note = 2'-O-methyluridine with a 3'-phosphorothioate linkage
  modified_base 2: mod_base = OTHER; note = 2'-fluorouridine with a 3'-phosphorothioate linkage
  modified_base 3: mod_base = cm
  modified_base 4: mod_base = cm
  modified_base 5: mod_base = OTHER; note = 2'-fluoroadenosine
  modified_base 6: mod_base = OTHER; note = 2'-O-methyladenosine
  modified_base 7: mod_base = OTHER; note = 2'-fluorocytidine
  modified_base 8: mod_base = OTHER; note = 2'-O-methyladenosine
  modified_base 9: mod_base = gm
  modified_base 10: mod_base = gm
  modified_base 11: mod_base = gm
  modified_base 12: mod_base = OTHER; note = 2'-O-methyladenosine
  modified_base 13: mod_base = um
  modified_base 14: mod_base = OTHER; note = 2'-fluoroguanosine
  modified_base 15: mod_base = gm
  modified_base 16: mod_base = OTHER; note = 2'-fluoroguanosine
  modified_base 17: mod_base = cm
  modified_base 18: mod_base = OTHER; note = 2'-O-methyladenosine
  modified_base 19: mod_base = um
  modified_base 20: mod_base = OTHER; note = 2'-O-methyladenosine
  modified_base 21: mod_base = OTHER; note = 2'-O-methyluridine with a 3'-phosphorothioate linkage
  modified_base 22: mod_base = OTHER; note = 2'-O-methyladenosine with a 3'-phosphorothioate linkage
  modified_base 23: mod_base = um
ttccaacagggatgggcatatat

SEQ ID NO: 1970 - RNA, 23 nt, synthetic construct
  source 1..23: mol_type = other RNA
  modified_base 1: mod_base = OTHER; note = 2'-O-methyluridine with a 3'-phosphorothioate linkage
  modified_base 2: mod_base = OTHER; note = 2'-fluorocytidine with a 3'-phosphorothioate linkage
  modified_base 3: mod_base = um
  modified_base 4: mod_base = cm
  modified_base 5: mod_base = OTHER; note = 2'-fluorocytidine
  modified_base 6: mod_base = OTHER; note = 2'-O-methyladenosine
  modified_base 7: mod_base = OTHER; note = 2'-fluoroadenosine
  modified_base 8: mod_base = cm
  modified_base 9: mod_base = OTHER; note = 2'-O-methyladenosine
  modified_base 10: mod_base = gm
  modified_base 11: mod_base = gm
  modified_base 12: mod_base = gm
  modified_base 13: mod_base = OTHER; note = 2'-O-methyladenosine
  modified_base 14: mod_base = OTHER; note = 2'-fluorouridine
  modified_base 15: mod_base = gm
  modified_base 16: mod_base = OTHER; note = 2'-fluoroguanosine
  modified_base 17: mod_base = gm
  modified_base 18: mod_base = cm
  modified_base 19: mod_base = OTHER; note = 2'-O-methyladenosine
  modified_base 20: mod_base = um
  modified_base 21: mod_base = OTHER; note = 2'-O-methyladenosine with a 3'-phosphorothioate linkage
  modified_base 22: mod_base = OTHER; note = 2'-O-methyluridine with a 3'-phosphorothioate linkage
  modified_base 23: mod_base = OTHER; note = 2'-O-methyladenosine
tctccaacagggatgggcatata

SEQ ID NO: 1971 - RNA, 23 nt, synthetic construct
  source 1..23: mol_type = other RNA
  modified_base 1: mod_base = OTHER; note = 2'-O-methyluridine with a 3'-phosphorothioate linkage
  modified_base 2: mod_base = OTHER; note = 2'-fluorocytidine with a 3'-phosphorothioate linkage
  modified_base 3: mod_base = gm
  modified_base 4: mod_base = gm
  modified_base 5: mod_base = OTHER; note = 2'-fluorocytidine
  modified_base 6: mod_base = um
  modified_base 7: mod_base = OTHER; note = 2'-fluoroguanosine
  modified_base 8: mod_base = cm
  modified_base 9: mod_base = um
  modified_base 10: mod_base = gm
  modified_base 11: mod_base = gm
  modified_base 12: mod_base = cm
  modified_base 13: mod_base = OTHER; note = 2'-O-methyladenosine
  modified_base 14: mod_base = OTHER; note = 2'-fluorocytidine
  modified_base 15: mod_base = cm
  modified_base 16: mod_base = OTHER; note = 2'-fluorouridine
  modified_base 17: mod_base = cm
  modified_base 18: mod_base = cm
  modified_base 19: mod_base = OTHER; note = 2'-O-methyladenosine
  modified_base 20: mod_base = cm
  modified_base 21: mod_base = OTHER; note = 2'-O-methylcytidine with a 3'-phosphorothioate linkage
  modified_base 22: mod_base = OTHER; note = 2'-O-methyladenosine with a 3'-phosphorothioate linkage
  modified_base 23: mod_base = OTHER; note = 2'-O-methyladenosine
tcggctgctggcacctccaccaa

SEQ ID NO: 1972 - RNA, 23 nt, synthetic construct
  source 1..23: mol_type = other RNA
  modified_base 1: mod_base = OTHER; note = 2'-O-methyluridine with a 3'-phosphorothioate linkage
  modified_base 2: mod_base = OTHER; note = 2'-fluoroguanosine with a 3'-phosphorothioate linkage
  modified_base 3: mod_base = um
  modified_base 4: mod_base = cm
  modified_base 5: mod_base = OTHER; note = 2'-fluoroadenosine
  modified_base 6: mod_base = um
  modified_base 7: mod_base = OTHER; note = 2'-fluorocytidine
  modified_base 8: mod_base = cm
  modified_base 9: mod_base = cm
  modified_base 10: mod_base = OTHER; note = 2'-O-methyladenosine
  modified_base 11: mod_base = um
  modified_base 12: mod_base = cm
  modified_base 13: mod_base = um
  modified_base 14: mod_base = OTHER; note = 2'-fluoroguanosine
  modified_base 15: mod_base = cm
  modified_base 16: mod_base = OTHER; note = 2'-fluoroadenosine
  modified_base 17: mod_base = OTHER; note = 2'-O-methyladenosine
  modified_base 18: mod_base = gm
  modified_base 19: mod_base = gm
  modified_base 20: mod_base = OTHER; note = 2'-O-methyladenosine
  modified_base 21: mod_base = OTHER; note = 2'-O-methylcytidine with a 3'-phosphorothioate linkage
  modified_base 22: mod_base = OTHER; note = 2'-O-methyluridine with a 3'-phosphorothioate linkage
  modified_base 23: mod_base = cm
tgtcatcccatctgcaaggactc

SEQ ID NO: 1973 - RNA, 23 nt, synthetic construct
  source 1..23: mol_type = other RNA
  modified_base 1: mod_base = OTHER; note = 2'-O-methyluridine with a 3'-phosphorothioate linkage
  modified_base 2: mod_base = OTHER; note = 2'-fluoroadenosine with a 3'-phosphorothioate linkage
  modified_base 3: mod_base = gm
  modified_base 4: mod_base = um
  modified_base 5: mod_base = OTHER; note = 2'-fluorocytidine
  modified_base 6: mod_base = OTHER; note = 2'-O-methyladenosine
  modified_base 7: mod_base = OTHER; note = 2'-fluorouridine
  modified_base 8: mod_base = cm
  modified_base 9: mod_base = cm
  modified_base 10: mod_base = cm
  modified_base 11: mod_base = OTHER; note = 2'-O-methyladenosine
  modified_base 12: mod_base = um
  modified_base 13: mod_base = cm
  modified_base 14: mod_base = OTHER; note = 2'-fluorouridine
  modified_base 15: mod_base = gm
  modified_base 16: mod_base = OTHER; note = 2'-fluorocytidine
  modified_base 17: mod_base = OTHER; note = 2'-O-methyladenosine
  modified_base 18: mod_base = OTHER; note = 2'-O-methyladenosine
  modified_base 19: mod_base = gm
  modified_base 20: mod_base = gm
  modified_base 21: mod_base = OTHER; note = 2'-O-methyladenosine with a 3'-phosphorothioate linkage
  modified_base 22: mod_base = OTHER; note = 2'-O-methylcytidine with a 3'-phosphorothioate linkage
  modified_base 23: mod_base = um
tagtcatcccatctgcaaggact

SEQ ID NO: 1974 - RNA, 23 nt, synthetic construct
  source 1..23: mol_type = other RNA
  modified_base 1: mod_base = OTHER; note = 2'-O-methyluridine with a 3'-phosphorothioate linkage
  modified_base 2: mod_base = OTHER; note = 2'-fluorocytidine with a 3'-phosphorothioate linkage
  modified_base 3: mod_base = gm
  modified_base 4: mod_base = OTHER; note = 2'-O-methyladenosine
  modified_base 5: mod_base = OTHER; note = 2'-fluoroguanosine
  modified_base 6: mod_base = um
  modified_base 7: mod_base = OTHER; note = 2'-fluorocytidine
  modified_base 8: mod_base = OTHER; note = 2'-O-methyladenosine
  modified_base 9: mod_base = um
  modified_base 10: mod_base = cm
  modified_base 11: mod_base = cm
  modified_base 12: mod_base = cm
  modified_base 13: mod_base = OTHER; note = 2'-O-methyladenosine
  modified_base 14: mod_base = OTHER; note = 2'-fluorouridine
  modified_base 15: mod_base = cm
  modified_base 16: mod_base = OTHER; note = 2'-fluorouridine
  modified_base 17: mod_base = gm
  modified_base 18: mod_base = cm
  modified_base 19: mod_base = OTHER; note = 2'-O-methyladenosine
  modified_base 20: mod_base = OTHER; note = 2'-O-methyladenosine
  modified_base 21: mod_base = OTHER; note = 2'-O-methylguanosine with a 3'-phosphorothioate linkage
  modified_base 22: mod_base = OTHER; note = 2'-O-methylguanosine with a 3'-phosphorothioate linkage
  modified_base 23: mod_base = OTHER; note = 2'-O-methyladenosine
tcgagtcatcccatctgcaagga

SEQ ID NO: 1975 - RNA, 23 nt, synthetic construct
  source 1..23: mol_type = other RNA
  modified_base 1: mod_base = OTHER; note = 2'-O-methyluridine with a 3'-phosphorothioate linkage
  modified_base 2: mod_base = OTHER; note = 2'-fluoroadenosine with a 3'-phosphorothioate linkage
  modified_base 3: mod_base = cm
  modified_base 4: mod_base = OTHER; note = 2'-O-methyladenosine
  modified_base 5: mod_base = OTHER; note = 2'-fluoroadenosine
  modified_base 6: mod_base = gm
  modified_base 7: mod_base = OTHER; note = 2'-fluorocytidine
  modified_base 8: mod_base = OTHER; note = 2'-O-methyladenosine
  modified_base 9: mod_base = cm
  modified_base 10: mod_base = gm
  modified_base 11: mod_base = um
  modified_base 12: mod_base = gm
  modified_base 13: mod_base = gm
  modified_base 14: mod_base = OTHER; note = 2'-fluoroadenosine
  modified_base 15: mod_base = OTHER; note = 2'-O-methyladenosine
  modified_base 16: mod_base = OTHER; note = 2'-fluoroguanosine
  modified_base 17: mod_base = OTHER; note = 2'-O-methyladenosine
  modified_base 18: mod_base = cm
  modified_base 19: mod_base = gm
  modified_base 20: mod_base = cm
  modified_base 21: mod_base = OTHER; note = 2'-O-methyladenosine with a 3'-phosphorothioate linkage
  modified_base 22: mod_base = OTHER; note = 2'-O-methylcytidine with a 3'-phosphorothioate linkage
  modified_base 23: mod_base = OTHER; note = 2'-O-methyladenosine
tacaagcacgtggaagacgcaca

SEQ ID NO: 1976 - RNA, 23 nt, synthetic construct
  source 1..23: mol_type = other RNA
  modified_base 1: mod_base = OTHER; note = 2'-O-methyluridine with a 3'-phosphorothioate linkage
  modified_base 2: mod_base = OTHER; note = 2'-fluorocytidine with a 3'-phosphorothioate linkage
  modified_base 3: mod_base = OTHER; note = 2'-O-methyladenosine
  modified_base 4: mod_base = cm
  modified_base 5: mod_base = OTHER; note = 2'-fluoroadenosine
  modified_base 6: mod_base = OTHER; note = 2'-O-methyladenosine
  modified_base 7: mod_base = OTHER; note = 2'-fluoroguanosine
  modified_base 8: mod_base = cm
  modified_base 9: mod_base = OTHER; note = 2'-O-methyladenosine
  modified_base 10: mod_base = cm
  modified_base 11: mod_base = gm
  modified_base 12: mod_base = um
  modified_base 13: mod_base = gm
  modified_base 14: mod_base = OTHER; note = 2'-fluoroguanosine
  modified_base 15: mod_base = OTHER; note = 2'-O-methyladenosine
  modified_base 16: mod_base = OTHER; note = 2'-fluoroadenosine
  modified_base 17: mod_base = gm
  modified_base 18: mod_base = OTHER; note = 2'-O-methyladenosine
  modified_base 19: mod_base = cm
  modified_base 20: mod_base = gm
  modified_base 21: mod_base = OTHER; note = 2'-O-methylcytidine with a 3'-phosphorothioate linkage
  modified_base 22: mod_base = OTHER; note = 2'-O-methyladenosine with a 3'-phosphorothioate linkage
  modified_base 23: mod_base = cm
tcacaagcacgtggaagacgcac

SEQ ID NO: 1977 - RNA, 23 nt, synthetic construct
  source 1..23: mol_type = other RNA
  modified_base 1: mod_base = OTHER; note = 2'-O-methyluridine with a 3'-phosphorothioate linkage
  modified_base 2: mod_base = OTHER; note = 2'-fluoroguanosine with a 3'-phosphorothioate linkage
  modified_base 3: mod_base = um
  modified_base 4: mod_base = cm
  modified_base 5: mod_base = OTHER; note = 2'-fluoroadenosine
  modified_base 6: mod_base = cm
  modified_base 7: mod_base = OTHER; note = 2'-fluoroadenosine
  modified_base 8: mod_base = OTHER; note = 2'-O-methyladenosine
  modified_base 9: mod_base = gm
  modified_base 10: mod_base = cm
  modified_base 11: mod_base = OTHER; note = 2'-O-methyladenosine
  modified_base 12: mod_base = cm
  modified_base 13: mod_base = gm
  modified_base 14: mod_base = OTHER; note = 2'-fluorouridine
  modified_base 15: mod_base = gm
  modified_base 16: mod_base = OTHER; note = 2'-fluoroguanosine
  modified_base 17: mod_base = OTHER; note = 2'-O-methyladenosine
  modified_base 18: mod_base = OTHER; note = 2'-O-methyladenosine
  modified_base 19: mod_base = gm
  modified_base 20: mod_base = OTHER; note = 2'-O-methyladenosine
  modified_base 21: mod_base = OTHER; note = 2'-O-methylcytidine with a 3'-phosphorothioate linkage
  modified_base 22: mod_base = OTHER; note = 2'-O-methylguanosine with a 3'-phosphorothioate linkage
  modified_base 23: mod_base = cm
tgtcacaagcacgtggaagacgc

SEQ ID NO: 1978 - RNA, 23 nt, synthetic construct
  source 1..23: mol_type = other RNA
  modified_base 1: mod_base = OTHER; note = 2'-O-methyluridine with a 3'-phosphorothioate linkage
  modified_base 2: mod_base = OTHER; note = 2'-fluorouridine with a 3'-phosphorothioate linkage
  modified_base 3: mod_base = gm
  modified_base 4: mod_base = cm
  modified_base 5: mod_base = OTHER; note = 2'-fluoroadenosine
  modified_base 6: mod_base = gm
  modified_base 7: mod_base = OTHER; note = 2'-fluoroadenosine
  modified_base 8: mod_base = gm
  modified_base 9: mod_base = um
  modified_base 10: mod_base = cm
  modified_base 11: mod_base = OTHER; note = 2'-O-methyladenosine
  modified_base 12: mod_base = cm
  modified_base 13: mod_base = OTHER; note = 2'-O-methyladenosine
  modified_base 14: mod_base = OTHER; note = 2'-fluoroadenosine
  modified_base 15: mod_base = gm
  modified_base 16: mod_base = OTHER; note = 2'-fluorocytidine
  modified_base 17: mod_base = OTHER; note = 2'-O-methyladenosine
  modified_base 18: mod_base = cm
  modified_base 19: mod_base = gm
  modified_base 20: mod_base = um
  modified_base 21: mod_base = OTHER; note = 2'-O-methylguanosine with a 3'-phosphorothioate linkage
  modified_base 22: mod_base = OTHER; note = 2'-O-methylguanosine with a 3'-phosphorothioate linkage
  modified_base 23: mod_base = OTHER; note = 2'-O-methyladenosine
ttgcagagtcacaagcacgtgga

SEQ ID NO: 1979 - RNA, 23 nt, synthetic construct
  source 1..23: mol_type = other RNA
  modified_base 1: mod_base = OTHER; note = 2'-O-methyluridine with a 3'-phosphorothioate linkage
  modified_base 2: mod_base = OTHER; note = 2'-fluorocytidine with a 3'-phosphorothioate linkage
  modified_base 3: mod_base = um
  modified_base 4: mod_base = um
  modified_base 5: mod_base = OTHER; note = 2'-fluorocytidine
  modified_base 6: mod_base = um
  modified_base 7: mod_base = OTHER; note = 2'-fluoroguanosine
  modified_base 8: mod_base = cm
  modified_base 9: mod_base = OTHER; note = 2'-O-methyladenosine
  modified_base 10: mod_base = gm
  modified_base 11: mod_base = OTHER; note = 2'-O-methyladenosine
  modified_base 12: mod_base = gm
  modified_base 13: mod_base = um
  modified_base 14: mod_base = OTHER; note = 2'-fluorocytidine
  modified_base 15: mod_base = OTHER; note = 2'-O-methyladenosine
  modified_base 16: mod_base = OTHER; note = 2'-fluorocytidine
  modified_base 17: mod_base = OTHER; note = 2'-O-methyladenosine
  modified_base 18: mod_base = OTHER; note = 2'-O-methyladenosine
  modified_base 19: mod_base = gm
  modified_base 20: mod_base = cm
  modified_base 21: mod_base = OTHER; note = 2'-O-methyladenosine with a 3'-phosphorothioate linkage
  modified_base 22: mod_base = OTHER; note = 2'-O-methylcytidine with a 3'-phosphorothioate linkage
  modified_base 23: mod_base = gm
tcttctgcagagtcacaagcacg

SEQ ID NO: 1980 - RNA, 23 nt, synthetic construct
  source 1..23: mol_type = other RNA
  modified_base 1: mod_base = OTHER; note = 2'-O-methyluridine with a 3'-phosphorothioate linkage
  modified_base 2: mod_base = OTHER; note = 2'-fluoroguanosine with a 3'-phosphorothioate linkage
  modified_base 3: mod_base = gm
  modified_base 4: mod_base = OTHER; note = 2'-O-methyladenosine
  modified_base 5: mod_base = OTHER; note = 2'-fluorocytidine
  modified_base 6: mod_base = um
  modified_base 7: mod_base = OTHER; note = 2'-fluoroguanosine
  modified_base 8: mod_base = gm
  modified_base 9: mod_base = OTHER; note = 2'-O-methyladenosine
  modified_base 10: mod_base = OTHER; note = 2'-O-methyladenosine
  modified_base 11: mod_base = OTHER; note = 2'-O-methyladenosine
  modified_base 12: mod_base = cm
  modified_base 13: mod_base = gm
  modified_base 14: mod_base = OTHER; note = 2'-fluoroguanosine
  modified_base 15: mod_base = OTHER; note = 2'-O-methyladenosine
  modified_base 16: mod_base = OTHER; note = 2'-fluorouridine
  modified_base 17: mod_base = OTHER; note = 2'-O-methyladenosine
  modified_base 18: mod_base = um
  modified_base 19: mod_base = OTHER; note = 2'-O-methyladenosine
  modified_base 20: mod_base = OTHER; note = 2'-O-methyladenosine
  modified_base 21: mod_base = OTHER; note = 2'-O-methyladenosine with a 3'-phosphorothioate linkage
  modified_base 22: mod_base = OTHER; note = 2'-O-methylguanosine with a 3'-phosphorothioate linkage
  modified_base 23: mod_base = gm
tggactggaaacggatataaagg

SEQ ID NO: 1981 - RNA, 23 nt, synthetic construct
  source 1..23: mol_type = other RNA
  modified_base 1: mod_base = OTHER; note = 2'-O-methyluridine with a 3'-phosphorothioate linkage
  modified_base 2: mod_base = OTHER; note = 2'-fluorouridine with a 3'-phosphorothioate linkage
  modified_base 3: mod_base = gm
  modified_base 4: mod_base = gm
  modified_base 5: mod_base = OTHER; note = 2'-fluoroadenosine
  modified_base 6: mod_base = cm
  modified_base 7: mod_base = OTHER; note = 2'-fluorouridine
  modified_base 8: mod_base = gm
  modified_base 9: mod_base = gm
  modified_base 10: mod_base = OTHER; note = 2'-O-methyladenosine
  modified_base 11: mod_base = OTHER; note = 2'-O-methyladenosine
  modified_base 12: mod_base = OTHER; note = 2'-O-methyladenosine
  modified_base 13: mod_base = cm
  modified_base 14: mod_base = OTHER; note = 2'-fluoroguanosine
  modified_base 15: mod_base = gm
  modified_base 16: mod_base = OTHER; note = 2'-fluoroadenosine
  modified_base 17: mod_base = um
  modified_base 18: mod_base = OTHER; note = 2'-O-methyladenosine
  modified_base 19: mod_base = um
  modified_base 20: mod_base = OTHER; note = 2'-O-methyladenosine
  modified_base 21: mod_base = OTHER; note = 2'-O-methyladenosine with a 3'-phosphorothioate linkage
  modified_base 22: mod_base = OTHER; note = 2'-O-methyladenosine with a 3'-phosphorothioate linkage
  modified_base 23: mod_base = gm
ttggactggaaacggatataaag

SEQ ID NO: 1982 - RNA, 23 nt, synthetic construct
  source 1..23: mol_type = other RNA
  modified_base 1: mod_base = OTHER; note = 2'-O-methyluridine with a 3'-phosphorothioate linkage
  modified_base 2: mod_base = OTHER; note = 2'-fluorocytidine with a 3'-phosphorothioate linkage
  modified_base 3: mod_base = cm
  modified_base 4: mod_base = um
  modified_base 5: mod_base = OTHER; note = 2'-fluoroguanosine
  modified_base 6: mod_base = gm
  modified_base 7: mod_base = OTHER; note = 2'-fluoroadenosine
  modified_base 8: mod_base = cm
  modified_base 9: mod_base = um
  modified_base 10: mod_base = gm
  modified_base 11: mod_base = gm
  modified_base 12: mod_base = OTHER; note = 2'-O-methyladenosine
  modified_base 13: mod_base = OTHER; note = 2'-O-methyladenosine
  modified_base 14: mod_base = OTHER; note = 2'-fluoroadenosine
  modified_base 15: mod_base = cm
  modified_base 16: mod_base = OTHER; note = 2'-fluoroguanosine
  modified_base 17: mod_base = gm
  modified_base 18: mod_base = OTHER; note = 2'-O-methyladenosine
  modified_base 19: mod_base = um
  modified_base 20: mod_base = OTHER; note = 2'-O-methyladenosine
  modified_base 21: mod_base = OTHER; note = 2'-O-methyluridine with a 3'-phosphorothioate linkage
  modified_base 22: mod_base = OTHER; note = 2'-O-methyladenosine with a 3'-phosphorothioate linkage
  modified_base 23: mod_base = OTHER; note = 2'-O-methyladenosine
tcctggactggaaacggatataa

SEQ ID NO: 1983 - RNA, 23 nt, synthetic construct
  source 1..23: mol_type = other RNA
  modified_base 1: mod_base = OTHER; note = 2'-O-methyluridine with a 3'-phosphorothioate linkage
  modified_base 2: mod_base = OTHER; note = 2'-fluorouridine with a 3'-phosphorothioate linkage
  modified_base 3: mod_base = OTHER; note = 2'-O-methyladenosine
  modified_base 4: mod_base = um
  modified_base 5: mod_base = OTHER; note = 2'-fluoroguanosine
  modified_base 6: mod_base = cm
  modified_base 7: mod_base = OTHER; note = 2'-fluorouridine
  modified_base 8: mod_base = cm
  modified_base 9: mod_base = cm
  modified_base 10: mod_base = cm
  modified_base 11: mod_base = OTHER; note = 2'-O-methyladenosine
  modified_base 12: mod_base = gm
  modified_base 13: mod_base = cm
  modified_base 14: mod_base = OTHER; note = 2'-fluorocytidine
  modified_base 15: mod_base = OTHER; note = 2'-O-methyladenosine
  modified_base 16: mod_base = OTHER; note = 2'-fluorouridine
  modified_base 17: mod_base = gm
  modified_base 18: mod_base = gm
  modified_base 19: mod_base = cm
  modified_base 20: mod_base = OTHER; note = 2'-O-methyladenosine
  modified_base 21: mod_base = OTHER; note = 2'-O-methylguanosine with a 3'-phosphorothioate linkage
  modified_base 22: mod_base = OTHER; note = 2'-O-methyladenosine with a 3'-phosphorothioate linkage
  modified_base 23: mod_base = gm
ttatgctcccagccatggcagag

SEQ ID NO: 1984 - RNA, 23 nt, synthetic construct
  source 1..23: mol_type = other RNA
  modified_base 1: mod_base = OTHER; note = 2'-O-methyluridine with a 3'-phosphorothioate linkage
  modified_base 2: mod_base = OTHER; note = 2'-fluorocytidine with a 3'-phosphorothioate linkage
  modified_base 3: mod_base = um
  modified_base 4: mod_base = OTHER; note = 2'-O-methyladenosine
  modified_base 5: mod_base = OTHER; note = 2'-fluorouridine
  modified_base 6: mod_base = gm
  modified_base 7: mod_base = OTHER; note = 2'-fluorocytidine
  modified_base 8: mod_base = um
  modified_base 9: mod_base = cm
  modified_base 10: mod_base = cm
  modified_base 11: mod_base = cm
  modified_base 12: mod_base = OTHER; note = 2'-O-methyladenosine
  modified_base 13: mod_base = gm
  modified_base 14: mod_base = OTHER; note = 2'-fluorocytidine
  modified_base 15: mod_base = cm
  modified_base 16: mod_base = OTHER; note = 2'-fluoroadenosine
  modified_base 17: mod_base = um
  modified_base 18: mod_base = gm
  modified_base 19: mod_base = gm
  modified_base 20: mod_base = cm
  modified_base 21: mod_base = OTHER; note = 2'-O-methyladenosine with a 3'-phosphorothioate linkage
  modified_base 22: mod_base = OTHER; note = 2'-O-methylguanosine with a 3'-phosphorothioate linkage
  modified_base 23: mod_base = OTHER; note = 2'-O-methyladenosine
tctatgctcccagccatggcaga

SEQ ID NO: 1985 - RNA, 23 nt, synthetic construct
  source 1..23: mol_type = other RNA
  modified_base 1: mod_base = OTHER; note = 2'-O-methyluridine with a 3'-phosphorothioate linkage
  modified_base 2: mod_base = OTHER; note = 2'-fluorocytidine with a 3'-phosphorothioate linkage
  modified_base 3: mod_base = cm
  modified_base 4: mod_base = um
  modified_base 5: mod_base = OTHER; note = 2'-fluoroadenosine
  modified_base 6: mod_base = um
  modified_base 7: mod_base = OTHER; note = 2'-fluoroguanosine
  modified_base 8: mod_base = cm
  modified_base 9: mod_base = um
  modified_base 10: mod_base = cm
  modified_base 11: mod_base = cm
  modified_base 12: mod_base = cm
  modified_base 13: mod_base = OTHER; note = 2'-O-methyladenosine
  modified_base 14: mod_base = OTHER; note = 2'-fluoroguanosine
  modified_base 15: mod_base = cm
  modified_base 16: mod_base = OTHER; note = 2'-fluorocytidine
  modified_base 17: mod_base = OTHER; note = 2'-O-methyladenosine
  modified_base 18: mod_base = um
  modified_base 19: mod_base = gm
  modified_base 20: mod_base = gm
  modified_base 21: mod_base = OTHER; note = 2'-O-methylcytidine with a 3'-phosphorothioate linkage
  modified_base 22: mod_base = OTHER; note = 2'-O-methyladenosine with a 3'-phosphorothioate linkage
  modified_base 23: mod_base = gm
tcctatgctcccagccatggcag

SEQ ID NO: 1986 - RNA, 23 nt, synthetic construct
  source 1..23: mol_type = other RNA
  modified_base 1: mod_base = OTHER; note = 2'-O-methyluridine with a 3'-phosphorothioate linkage
  modified_base 2: mod_base = OTHER; note = 2'-fluorocytidine with a 3'-phosphorothioate linkage
  modified_base 3: mod_base = OTHER; note = 2'-O-methyladenosine
  modified_base 4: mod_base = um
  modified_base 5: mod_base = OTHER; note = 2'-fluorouridine
  modified_base 6: mod_base = cm
  modified_base 7: mod_base = OTHER; note = 2'-fluorouridine
  modified_base 8: mod_base = gm
  modified_base 9: mod_base = um
  modified_base 10: mod_base = gm
  modified_base 11: mod_base = cm
  modified_base 12: mod_base = um
  modified_base 13: mod_base = gm
  modified_base 14: mod_base = OTHER; note = 2'-fluorocytidine
  modified_base 15: mod_base = OTHER; note = 2'-O-methyladenosine
  modified_base 16: mod_base = OTHER; note = 2'-fluorouridine
  modified_base 17: mod_base = cm
  modified_base 18: mod_base = cm
  modified_base 19: mod_base = um
  modified_base 20: mod_base = gm
  modified_base 21: mod_base = OTHER; note = 2'-O-methyluridine with a 3'-phosphorothioate linkage
  modified_base 22: mod_base = OTHER; note = 2'-O-methylcytidine with a 3'-phosphorothioate linkage
  modified_base 23: mod_base = cm
tcattctgtgctgcatcctgtcc

SEQ ID NO: 1987 - RNA, 23 nt, synthetic construct
  source 1..23: mol_type = other RNA
  modified_base 1: mod_base = OTHER; note = 2'-O-methyluridine with a 3'-phosphorothioate linkage
  modified_base 2: mod_base = OTHER; note = 2'-fluoroadenosine with a 3'-phosphorothioate linkage
  modified_base 3: mod_base = gm
  modified_base 4: mod_base = um
  modified_base 5: mod_base = OTHER; note = 2'-fluoroadenosine
  modified_base 6: mod_base = OTHER; note = 2'-O-methyladenosine
  modified_base 7: mod_base = OTHER; note = 2'-fluorouridine
  modified_base 8: mod_base = OTHER; note = 2'-O-methyladenosine
  modified_base 9: mod_base = cm
  modified_base 10: mod_base = OTHER; note = 2'-O-methyladenosine
  modified_base 11: mod_base = gm
  modified_base 12: mod_base = um
  modified_base 13: mod_base = um
  modified_base 14: mod_base = OTHER; note = 2'-fluorouridine
  modified_base 15: mod_base = gm
  modified_base 16: mod_base = OTHER; note = 2'-fluoroadenosine
  modified_base 17: mod_base = OTHER; note = 2'-O-methyladenosine
  modified_base 18: mod_base = cm
  modified_base 19: mod_base = um
  modified_base 20: mod_base = OTHER; note = 2'-O-methyladenosine
  modified_base 21: mod_base = OTHER; note = 2'-O-methylcytidine with a 3'-phosphorothioate linkage
  modified_base 22: mod_base = OTHER; note = 2'-O-methylcytidine with a 3'-phosphorothioate linkage
  modified_base 23: mod_base = OTHER; note = 2'-O-methyladenosine
tagtaatacagtttgaactacca

SEQ ID NO: 1988 - RNA, 23 nt, synthetic construct
  source 1..23: mol_type = other RNA
  modified_base 1: mod_base = OTHER; note = 2'-O-methyluridine with a 3'-phosphorothioate linkage
  modified_base 2: mod_base = OTHER; note = 2'-fluorouridine with a 3'-phosphorothioate linkage
  modified_base 3: mod_base = OTHER; note = 2'-O-methyladenosine
  modified_base 4: mod_base = OTHER; note = 2'-O-methyladenosine
  modified_base 5: mod_base = OTHER; note = 2'-fluoroadenosine
  modified_base 6: mod_base = gm
  modified_base 7: mod_base = OTHER; note = 2'-fluorouridine
  modified_base 8: mod_base = OTHER; note = 2'-O-methyladenosine
  modified_base 9: mod_base = OTHER; note = 2'-O-methyladenosine
  modified_base 10: mod_base = um
  modified_base 11: mod_base = OTHER; note = 2'-O-methyladenosine
  modified_base 12: mod_base = cm
  modified_base 13: mod_base = OTHER; note = 2'-O-methyladenosine
  modified_base 14: mod_base = OTHER; note = 2'-fluoroguanosine
  modified_base 15: mod_base = um
  modified_base 16: mod_base = OTHER; note = 2'-fluorouridine
  modified_base 17: mod_base = um
  modified_base 18: mod_base = gm
  modified_base 19: mod_base = OTHER; note = 2'-O-methyladenosine
  modified_base 20: mod_base = OTHER; note = 2'-O-methyladenosine
  modified_base 21: mod_base = OTHER; note = 2'-O-methylcytidine with a 3'-phosphorothioate linkage
  modified_base 22: mod_base = OTHER; note = 2'-O-methyluridine with a 3'-phosphorothioate linkage
  modified_base 23: mod_base = OTHER; note = 2'-O-methyladenosine
ttaaagtaatacagtttgaacta

SEQ ID NO: 1989 - RNA, 23 nt, synthetic construct
  source 1..23: mol_type = other RNA
  modified_base 1: mod_base = OTHER; note = 2'-O-methyluridine with a 3'-phosphorothioate linkage
  modified_base 2: mod_base = OTHER; note = 2'-fluorouridine with a 3'-phosphorothioate linkage
  modified_base 3: mod_base = um
  modified_base 4: mod_base = OTHER; note = 2'-O-methyladenosine
  modified_base 5: mod_base = OTHER; note = 2'-fluoroadenosine
  modified_base 6: mod_base = OTHER; note = 2'-O-methyladenosine
  modified_base 7: mod_base = OTHER; note = 2'-fluoroguanosine
  modified_base 8: mod_base = um
  modified_base 9: mod_base = OTHER; note = 2'-O-methyladenosine
  modified_base 10: mod_base = OTHER; note = 2'-O-methyladenosine
  modified_base 11: mod_base = um
  modified_base 12: mod_base = OTHER; note = 2'-O-methyladenosine
  modified_base 13: mod_base = cm
  modified_base 14: mod_base = OTHER; note = 2'-fluoroadenosine
  modified_base 15: mod_base = gm
  modified_base 16: mod_base = OTHER; note = 2'-fluorouridine
  modified_base 17: mod_base = um
  modified_base 18: mod_base = um
  modified_base 19: mod_base = gm
  modified_base 20: mod_base = OTHER; note = 2'-O-methyladenosine
  modified_base 21: mod_base = OTHER; note = 2'-O-methyladenosine with a 3'-phosphorothioate linkage
  modified_base 22: mod_base = OTHER; note = 2'-O-methylcytidine with a 3'-phosphorothioate linkage
  modified_base 23: mod_base = um
tttaaagtaatacagtttgaact

SEQ ID NO: 1990 - RNA, 23 nt, synthetic construct
  source 1..23: mol_type = other RNA
  modified_base 1: mod_base = OTHER; note = 2'-O-methyluridine with a 3'-phosphorothioate linkage
  modified_base 2: mod_base = OTHER; note = 2'-fluoroadenosine with a 3'-phosphorothioate linkage
  modified_base 3: mod_base = um
  modified_base 4: mod_base = um
  modified_base 5: mod_base = OTHER; note = 2'-fluoroadenosine
  modified_base 6: mod_base = OTHER; note = 2'-O-methyladenosine
  modified_base 7: mod_base = OTHER; note = 2'-fluoroadenosine
  modified_base 8: mod_base = gm
  modified_base 9: mod_base = um
  modified_base 10: mod_base = OTHER; note = 2'-O-methyladenosine
  modified_base 11: mod_base = OTHER; note = 2'-O-methyladenosine
  modified_base 12: mod_base = um
  modified_base 13: mod_base = OTHER; note = 2'-O-methyladenosine
  modified_base 14: mod_base = OTHER; note = 2'-fluorocytidine
  modified_base 15: mod_base = OTHER; note = 2'-O-methyladenosine
  modified_base 16: mod_base = OTHER; note = 2'-fluoroguanosine
  modified_base 17: mod_base = um
  modified_base 18: mod_base = um
  modified_base 19: mod_base = um
  modified_base 20: mod_base = gm
  modified_base 21: mod_base = OTHER; note = 2'-O-methyladenosine with a 3'-phosphorothioate linkage
  modified_base 22: mod_base = OTHER; note = 2'-O-methyladenosine with a 3'-phosphorothioate linkage
  modified_base 23: mod_base = cm
tattaaagtaatacagtttgaac

SEQ ID NO: 1991 - RNA, 23 nt, synthetic construct
  source 1..23: mol_type = other RNA
  modified_base 1: mod_base = OTHER; note = 2'-O-methyluridine with a 3'-phosphorothioate linkage
  modified_base 2: mod_base = OTHER; note = 2'-fluorouridine with a 3'-phosphorothioate linkage
  modified_base 3: mod_base = cm
  modified_base 4: mod_base = cm
  modified_base 5: mod_base = OTHER; note = 2'-fluoroadenosine
  modified_base 6: mod_base = um
  modified_base 7: mod_base = OTHER; note = 2'-fluorouridine
  modified_base 8: mod_base = OTHER; note = 2'-O-methyladenosine
  modified_base 9: mod_base = OTHER; note = 2'-O-methyladenosine
  modified_base 10: mod_base = OTHER; note = 2'-O-methyladenosine
  modified_base 11: mod_base = gm
  modified_base 12: mod_base = um
  modified_base 13: mod_base = OTHER; note = 2'-O-methyladenosine
  modified_base 14: mod_base = OTHER; note = 2'-fluoroadenosine
  modified_base 15: mod_base = um
  modified_base 16: mod_base = OTHER; note = 2'-fluoroadenosine
  modified_base 17: mod_base = cm
  modified_base 18: mod_base = OTHER; note = 2'-O-methyladenosine
  modified_base 19: mod_base = gm
  modified_base 20: mod_base = um
  modified_base 21: mod_base = OTHER; note = 2'-O-methyluridine with a 3'-phosphorothioate linkage
  modified_base 22: mod_base = OTHER; note = 2'-O-methyluridine with a 3'-phosphorothioate linkage
  modified_base 23: mod_base = gm
ttccattaaagtaatacagtttg

SEQ ID NO: 1992 - RNA, 23 nt, synthetic construct
  source 1..23: mol_type = other RNA
  modified_base 1: mod_base = OTHER; note = 2'-O-methyluridine with a 3'-phosphorothioate linkage
  modified_base 2: mod_base = OTHER; note = 2'-fluorouridine with a 3'-phosphorothioate linkage
  modified_base 3: mod_base = um
  modified_base 4: mod_base = cm
  modified_base 5: mod_base = OTHER; note = 2'-fluorocytidine
  modified_base 6: mod_base = OTHER; note = 2'-O-methyladenosine
  modified_base 7: mod_base = OTHER; note = 2'-fluorouridine
  modified_base 8: mod_base = um
  modified_base 9: mod_base = OTHER; note = 2'-O-methyladenosine
  modified_base 10: mod_base = OTHER; note = 2'-O-methyladenosine
  modified_base 11: mod_base = OTHER; note = 2'-O-methyladenosine
  modified_base 12: mod_base = gm
  modified_base 13: mod_base = um
  modified_base 14: mod_base = OTHER; note = 2'-fluoroadenosine
  modified_base 15: mod_base = OTHER; note = 2'-O-methyladenosine
  modified_base 16: mod_base = OTHER; note = 2'-fluorouridine
  modified_base 17: mod_base = OTHER; note = 2'-O-methyladenosine
  modified_base 18: mod_base = cm
  modified_base 19: mod_base = OTHER; note = 2'-O-methyladenosine
  modified_base 20: mod_base = gm
  modified_base 21: mod_base = OTHER; note = 2'-O-methyluridine with a 3'-phosphorothioate linkage
  modified_base 22: mod_base = OTHER; note = 2'-O-methyluridine with a 3'-phosphorothioate linkage
  modified_base 23: mod_base = um
tttccattaaagtaatacagttt

SEQ ID NO: 1993 - RNA, 23 nt, synthetic construct
  source 1..23: mol_type = other RNA
  modified_base 1: mod_base = OTHER; note = 2'-O-methyluridine with a 3'-phosphorothioate linkage
  modified_base 2: mod_base = OTHER; note = 2'-fluorocytidine with a 3'-phosphorothioate linkage
  modified_base 3: mod_base = um
  modified_base 4: mod_base = um
  modified_base 5: mod_base = OTHER; note = 2'-fluorocytidine
  modified_base 6: mod_base = cm
  modified_base 7: mod_base = OTHER; note = 2'-fluoroadenosine
  modified_base 8: mod_base = um
  modified_base 9: mod_base = um
  modified_base 10: mod_base = OTHER; note = 2'-O-methyladenosine
  modified_base 11: mod_base = OTHER; note = 2'-O-methyladenosine
  modified_base 12: mod_base = OTHER; note = 2'-O-methyladenosine
  modified_base 13: mod_base = gm
  modified_base 14: mod_base = OTHER; note = 2'-fluorouridine
  modified_base 15: mod_base = OTHER; note = 2'-O-methyladenosine
  modified_base 16: mod_base = OTHER; note = 2'-fluoroadenosine
  modified_base 17: mod_base = um
  modified_base 18: mod_base = OTHER; note = 2'-O-methyladenosine
  modified_base 19: mod_base = cm
  modified_base 20: mod_base = OTHER; note = 2'-O-methyladenosine
  modified_base 21: mod_base = OTHER; note = 2'-O-methylguanosine with a 3'-phosphorothioate linkage
  modified_base 22: mod_base = OTHER; note = 2'-O-methyluridine with a 3'-phosphorothioate linkage
  modified_base 23: mod_base = um
tcttccattaaagtaatacagtt

SEQ ID NO: 1994 - RNA, 23 nt, synthetic construct
  source 1..23: mol_type = other RNA
  modified_base 1: mod_base = OTHER; note = 2'-O-methyluridine with a 3'-phosphorothioate linkage
  modified_base 2: mod_base = OTHER; note = 2'-fluoroguanosine with a 3'-phosphorothioate linkage
  modified_base 3: mod_base = cm
  modified_base 4: mod_base = um
  modified_base 5: mod_base = OTHER; note = 2'-fluorouridine
  modified_base 6: mod_base = cm
  modified_base 7: mod_base = OTHER; note = 2'-fluorocytidine
  modified_base 8: mod_base = OTHER; note = 2'-O-methyladenosine
  modified_base 9: mod_base = um
  modified_base 10: mod_base = um
  modified_base 11: mod_base = OTHER; note = 2'-O-methyladenosine
  modified_base 12: mod_base = OTHER; note = 2'-O-methyladenosine
  modified_base 13: mod_base = OTHER; note = 2'-O-methyladenosine
  modified_base 14: mod_base = OTHER; note = 2'-fluoroguanosine
  modified_base 15: mod_base = um
  modified_base 16: mod_base = OTHER; note = 2'-fluoroadenosine
  modified_base 17: mod_base = OTHER; note = 2'-O-methyladenosine
  modified_base 18: mod_base = um
  modified_base 19: mod_base = OTHER; note = 2'-O-methyladenosine
  modified_base 20: mod_base = cm
  modified_base 21: mod_base = OTHER; note = 2'-O-methyladenosine with a 3'-phosphorothioate linkage
  modified_base 22: mod_base = OTHER; note = 2'-O-methylguanosine with a 3'-phosphorothioate linkage
  modified_base 23: mod_base = um
tgcttccattaaagtaatacagt

SEQ ID NO: 1995 - RNA, 23 nt, synthetic construct
  source 1..23: mol_type = other RNA
  modified_base 1: mod_base = OTHER; note = 2'-O-methyluridine with a 3'-phosphorothioate linkage
  modified_base 2: mod_base = OTHER; note = 2'-fluoroadenosine with a 3'-phosphorothioate linkage
  modified_base 3: mod_base = um
  modified_base 4: mod_base = gm
  modified_base 5: mod_base = OTHER; note = 2'-fluoroguanosine
  modified_base 6: mod_base = um
  modified_base 7: mod_base = OTHER; note = 2'-fluoroguanosine
  modified_base 8: mod_base = cm
  modified_base 9: mod_base = OTHER; note = 2'-O-methyladenosine
  modified_base 10: mod_base = gm
  modified_base 11: mod_base = cm
  modified_base 12: mod_base = um
  modified_base 13: mod_base = gm
  modified_base 14: mod_base = OTHER; note = 2'-fluoroadenosine
  modified_base 15: mod_base = um
  modified_base 16: mod_base = OTHER; note = 2'-fluoroadenosine
  modified_base 17: mod_base = um
  modified_base 18: mod_base = OTHER; note = 2'-O-methyladenosine
  modified_base 19: mod_base = um
  modified_base 20: mod_base = OTHER; note = 2'-O-methyladenosine
  modified_base 21: mod_base = OTHER; note = 2'-O-methyladenosine with a 3'-phosphorothioate linkage
  modified_base 22: mod_base = OTHER; note = 2'-O-methyladenosine with a 3'-phosphorothioate linkage
  modified_base 23: mod_base = um
tatggtgcagctgatatataaat

SEQ ID NO: 1996 - RNA, 23 nt, synthetic construct
  source 1..23: mol_type = other RNA
  modified_base 1: mod_base = OTHER; note = 2'-O-methyluridine with a 3'-phosphorothioate linkage
  modified_base 2: mod_base = OTHER; note = 2'-fluorocytidine with a 3'-phosphorothioate linkage
  modified_base 3: mod_base = OTHER; note = 2'-O-methyladenosine
  modified_base 4: mod_base = um
  modified_base 5: mod_base = OTHER; note = 2'-fluoroguanosine
  modified_base 6: mod_base = gm
  modified_base 7: mod_base = OTHER; note = 2'-fluorouridine
  modified_base 8: mod_base = gm
  modified_base 9: mod_base = cm
  modified_base 10: mod_base = OTHER; note = 2'-O-methyladenosine
  modified_base 11: mod_base = gm
  modified_base 12: mod_base = cm
  modified_base 13: mod_base = um
  modified_base 14: mod_base = OTHER; note = 2'-fluoroguanosine
  modified_base 15: mod_base = OTHER; note = 2'-O-methyladenosine
  modified_base 16: mod_base = OTHER; note = 2'-fluorouridine
  modified_base 17: mod_base = OTHER; note = 2'-O-methyladenosine
  modified_base 18: mod_base = um
  modified_base 19: mod_base = OTHER; note = 2'-O-methyladenosine
  modified_base 20: mod_base = um
  modified_base 21: mod_base = OTHER; note = 2'-O-methyladenosine with a 3'-phosphorothioate linkage
  modified_base 22: mod_base = OTHER; note = 2'-O-methyladenosine with a 3'-phosphorothioate linkage
  modified_base 23: mod_base = OTHER; note = 2'-O-methyladenosine
tcatggtgcagctgatatataaa

SEQ ID NO: 1997 - RNA, 23 nt, synthetic construct
  source 1..23: mol_type = other RNA
  modified_base 1: mod_base = OTHER; note = 2'-O-methyluridine with a 3'-phosphorothioate linkage
  modified_base 2: mod_base = OTHER; note = 2'-fluoroguanosine with a 3'-phosphorothioate linkage
  modified_base 3: mod_base = cm
  modified_base 4: mod_base = OTHER; note = 2'-O-methyladenosine
  modified_base 5: mod_base = OTHER; note = 2'-fluorouridine
  modified_base 6: mod_base = gm
  modified_base 7: mod_base = OTHER; note = 2'-fluoroguanosine
  modified_base 8: mod_base = um
  modified_base 9: mod_base = gm
  modified_base 10: mod_base = cm
  modified_base 11: mod_base = OTHER; note = 2'-O-methyladenosine
  modified_base 12: mod_base = gm
  modified_base 13: mod_base = cm
  modified_base 14: mod_base = OTHER; note = 2'-fluorouridine
  modified_base 15: mod_base = gm
  modified_base 16: mod_base = OTHER; note = 2'-fluoroadenosine
  modified_base 17: mod_base = um
  modified_base 18: mod_base = OTHER; note = 2'-O-methyladenosine
  modified_base 19: mod_base = um
  modified_base 20: mod_base = OTHER; note = 2'-O-methyladenosine
  modified_base 21: mod_base = OTHER; note = 2'-O-methyluridine with a 3'-phosphorothioate linkage
  modified_base 22: mod_base = OTHER; note = 2'-O-methyladenosine with a 3'-phosphorothioate linkage
  modified_base 23: mod_base = OTHER; note = 2'-O-methyladenosine
tgcatggtgcagctgatatataa

SEQ ID NO: 1998 - RNA, 23 nt, synthetic construct
  source 1..23: mol_type = other RNA
  modified_base 1: mod_base = OTHER; note = 2'-O-methyluridine with a 3'-phosphorothioate linkage
  modified_base 2: mod_base = OTHER; note = 2'-fluoroguanosine with a 3'-phosphorothioate linkage
  modified_base 3: mod_base = gm
  modified_base 4: mod_base = cm
  modified_base 5: mod_base = OTHER; note = 2'-fluoroadenosine
  modified_base 6: mod_base = um
  modified_base 7: mod_base = OTHER; note = 2'-fluoroguanosine
  modified_base 8: mod_base = gm
  modified_base 9: mod_base = um
  modified_base 10: mod_base = gm
  modified_base 11: mod_base = cm
  modified_base 12: mod_base = OTHER; note = 2'-O-methyladenosine
  modified_base 13: mod_base = gm
  modified_base 14: mod_base = OTHER; note = 2'-fluorocytidine
  modified_base 15: mod_base = um
  modified_base 16: mod_base = OTHER; note = 2'-fluoroguanosine
  modified_base 17: mod_base = OTHER; note = 2'-O-methyladenosine
  modified_base 18: mod_base = um
  modified_base 19: mod_base = OTHER; note = 2'-O-methyladenosine
  modified_base 20: mod_base = um
  modified_base 21: mod_base = OTHER; note = 2'-O-methyladenosine with a 3'-phosphorothioate linkage
  modified_base 22: mod_base = OTHER; note = 2'-O-methyluridine with a 3'-phosphorothioate linkage
  modified_base 23: mod_base = OTHER; note = 2'-O-methyladenosine
tggcatggtgcagctgatatata

SEQ ID NO: 1999 - RNA, 23 nt, synthetic construct
  source 1..23: mol_type = other RNA
  modified_base 1: mod_base = OTHER; note = 2'-O-methyluridine with a 3'-phosphorothioate linkage
  modified_base 2: mod_base = OTHER; note = 2'-fluorouridine with a 3'-phosphorothioate linkage
  modified_base 3: mod_base = gm
  modified_base 4: mod_base = gm
  modified_base 5: mod_base = OTHER; note = 2'-fluorocytidine
  modified_base 6: mod_base = OTHER; note = 2'-O-methyladenosine
  modified_base 7: mod_base = OTHER; note = 2'-fluorouridine
  modified_base 8: mod_base = gm
  modified_base 9: mod_base = gm
  modified_base 10: mod_base = um
  modified_base 11: mod_base = gm
  modified_base 12: mod_base = cm
  modified_base 13: mod_base = OTHER; note = 2'-O-methyladenosine
  modified_base 14: mod_base = OTHER; note = 2'-fluoroguanosine
  modified_base 15: mod_base = cm
  modified_base 16: mod_base = OTHER; note = 2'-fluorouridine
  modified_base 17: mod_base = gm
  modified_base 18: mod_base = OTHER; note = 2'-O-methyladenosine
  modified_base 19: mod_base = um
  modified_base 20: mod_base = OTHER; note = 2'-O-methyladenosine
  modified_base 21: mod_base = OTHER; note = 2'-O-methyluridine with a 3'-phosphorothioate linkage
  modified_base 22: mod_base = OTHER; note = 2'-O-methyladenosine with a 3'-phosphorothioate linkage
  modified_base 23: mod_base = um
ttggcatggtgcagctgatatat

SEQ ID NO: 2000 - RNA, 23 nt, synthetic construct
  source 1..23: mol_type = other RNA
  modified_base 1: mod_base = OTHER; note = 2'-O-methyluridine with a 3'-phosphorothioate linkage
  modified_base 2: mod_base = OTHER; note = 2'-fluoroguanosine with a 3'-phosphorothioate linkage
  modified_base 3: mod_base = OTHER; note = 2'-O-methyladenosine
  modified_base 4: mod_base = um
  modified_base 5: mod_base = OTHER; note = 2'-fluoroguanosine
  modified_base 6: mod_base = gm
  modified_base 7: mod_base = OTHER; note = 2'-fluorocytidine
  modified_base 8: mod_base = OTHER; note = 2'-O-methyladenosine
  modified_base 9: mod_base = um
  modified_base 10: mod_base = gm
  modified_base 11: mod_base = gm
  modified_base 12: mod_base = um
  modified_base 13: mod_base = gm
  modified_base 14: mod_base = OTHER; note = 2'-fluorocytidine
  modified_base 15: mod_base = OTHER; note = 2'-O-methyladenosine
  modified_base 16: mod_base = OTHER; note = 2'-fluoroguanosine
  modified_base 17: mod_base = cm
  modified_base 18: mod_base = um
  modified_base 19: mod_base = gm
  modified_base 20: mod_base = OTHER; note = 2'-O-methyladenosine
  modified_base 21: mod_base = OTHER; note = 2'-O-methyluridine with a 3'-phosphorothioate linkage
  modified_base 22: mod_base = OTHER; note = 2'-O-methyladenosine with a 3'-phosphorothioate linkage
  modified_base 23: mod_base = um
tgatggcatggtgcagctgatat

SEQ ID NO: 2001 - RNA, 23 nt, synthetic construct
  source 1..23: mol_type = other RNA
  modified_base 1: mod_base = OTHER; note = 2'-O-methyluridine with a 3'-phosphorothioate linkage
  modified_base 2: mod_base = OTHER; note = 2'-fluoroguanosine with a 3'-phosphorothioate linkage
  modified_base 3: mod_base = OTHER; note = 2'-O-methyladenosine
  modified_base 4: mod_base = OTHER; note = 2'-O-methyladenosine
  modified_base 5: mod_base = OTHER; note = 2'-fluorocytidine
  modified_base 6: mod_base = OTHER; note = 2'-O-methyladenosine
  modified_base 7: mod_base = OTHER; note = 2'-fluorocytidine
  modified_base 8: mod_base = cm
  modified_base 9: mod_base = um
  modified_base 10: mod_base = OTHER; note = 2'-O-methyladenosine
  modified_base 11: mod_base = gm
  modified_base 12: mod_base = cm
  modified_base 13: mod_base = OTHER; note = 2'-O-methyladenosine
  modified_base 14: mod_base = OTHER; note = 2'-fluorouridine
  modified_base 15: mod_base = cm
  modified_base 16: mod_base = OTHER; note = 2'-fluorouridine
  modified_base 17: mod_base = gm
  modified_base 18: mod_base = cm
  modified_base 19: mod_base = OTHER; note = 2'-O-methyladenosine
  modified_base 20: mod_base = OTHER; note = 2'-O-methyladenosine
  modified_base 21: mod_base = OTHER; note = 2'-O-methyladenosine with a 3'-phosphorothioate linkage
  modified_base 22: mod_base = OTHER; note = 2'-O-methylcytidine with a 3'-phosphorothioate linkage
  modified_base 23: mod_base = OTHER; note = 2'-O-methyladenosine
tgaacacctagcatctgcaaaca

SEQ ID NO: 2002 - RNA, 23 nt, synthetic construct
  source 1..23: mol_type = other RNA
  modified_base 1: mod_base = OTHER; note = 2'-O-methyluridine with a 3'-phosphorothioate linkage
  modified_base 2: mod_base = OTHER; note = 2'-fluorouridine with a 3'-phosphorothioate linkage
  modified_base 3: mod_base = um
  modified_base 4: mod_base = gm
  modified_base 5: mod_base = OTHER; note = 2'-fluoroadenosine
  modified_base 6: mod_base = OTHER; note = 2'-O-methyladenosine
  modified_base 7: mod_base = OTHER; note = 2'-fluorocytidine
  modified_base 8: mod_base = OTHER; note = 2'-O-methyladenosine
  modified_base 9: mod_base = cm
  modified_base 10: mod_base = cm
  modified_base 11: mod_base = um
  modified_base 12: mod_base = OTHER; note = 2'-O-methyladenosine
  modified_base 13: mod_base = gm
  modified_base 14: mod_base = OTHER; note = 2'-fluorocytidine
  modified_base 15: mod_base = OTHER; note = 2'-O-methyladenosine
  modified_base 16: mod_base = OTHER; note = 2'-fluorouridine
  modified_base 17: mod_base = cm
  modified_base 18: mod_base = um
  modified_base 19: mod_base = gm
  modified_base 20: mod_base = cm
  modified_base 21: mod_base = OTHER; note = 2'-O-methyladenosine with a 3'-phosphorothioate linkage
  modified_base 22: mod_base = OTHER; note = 2'-O-methyladenosine with a 3'-phosphorothioate linkage
  modified_base 23: mod_base = OTHER; note = 2'-O-methyladenosine
tttgaacacctagcatctgcaaa

SEQ ID NO: 2003 - RNA, 23 nt, synthetic construct
  source 1..23: mol_type = other RNA
  modified_base 1: mod_base = OTHER; note = 2'-O-methyluridine with a 3'-phosphorothioate linkage
  modified_base 2: mod_base = OTHER; note = 2'-fluorocytidine with a 3'-phosphorothioate linkage
  modified_base 3: mod_base = um
  modified_base 4: mod_base = um
  modified_base 5: mod_base = OTHER; note = 2'-fluoroguanosine
  modified_base 6: mod_base = OTHER; note = 2'-O-methyladenosine
  modified_base 7: mod_base = OTHER; note = 2'-fluoroadenosine
  modified_base 8: mod_base = cm
  modified_base 9: mod_base = OTHER; note = 2'-O-methyladenosine
  modified_base 10: mod_base = cm
  modified_base 11: mod_base = cm
  modified_base 12: mod_base = um
  modified_base 13: mod_base = OTHER; note = 2'-O-methyladenosine
  modified_base 14: mod_base = OTHER; note = 2'-fluoroguanosine
  modified_base 15: mod_base = cm
  modified_base 16: mod_base = OTHER; note = 2'-fluoroadenosine
  modified_base 17: mod_base = um
  modified_base 18: mod_base = cm
  modified_base 19: mod_base = um
  modified_base 20: mod_base = gm
  modified_base 21: mod_base = OTHER; note = 2'-O-methylcytidine with a 3'-phosphorothioate linkage
  modified_base 22: mod_base = OTHER; note = 2'-O-methyladenosine with a 3'-phosphorothioate linkage
  modified_base 23: mod_base = OTHER; note = 2'-O-methyladenosine
tcttgaacacctagcatctgcaa

SEQ ID NO: 2004 - RNA, 23 nt, synthetic construct
  source 1..23: mol_type = other RNA
  modified_base 1: mod_base = OTHER; note = 2'-O-methyluridine with a 3'-phosphorothioate linkage
  modified_base 2: mod_base = OTHER; note = 2'-fluorocytidine with a 3'-phosphorothioate linkage
  modified_base 3: mod_base = cm
  modified_base 4: mod_base = um
  modified_base 5: mod_base = OTHER; note = 2'-fluorouridine
  modified_base 6: mod_base = gm
  modified_base 7: mod_base = OTHER; note = 2'-fluoroadenosine
  modified_base 8: mod_base = OTHER; note = 2'-O-methyladenosine
  modified_base 9: mod_base = cm
  modified_base 10: mod_base = OTHER; note = 2'-O-methyladenosine
  modified_base 11: mod_base = cm
  modified_base 12: mod_base = cm
  modified_base 13: mod_base = um
  modified_base 14: mod_base = OTHER; note = 2'-fluoroadenosine
  modified_base 15: mod_base = gm
  modified_base 16: mod_base = OTHER; note = 2'-fluorocytidine
  modified_base 17: mod_base = OTHER; note = 2'-O-methyladenosine
  modified_base 18: mod_base = um
  modified_base 19: mod_base = cm
  modified_base 20: mod_base = um
  modified_base 21: mod_base = OTHER; note = 2'-O-methylguanosine with a 3'-phosphorothioate linkage
  modified_base 22: mod_base = OTHER; note = 2'-O-methylcytidine with a 3'-phosphorothioate linkage
  modified_base 23: mod_base = OTHER; note = 2'-O-methyladenosine
tccttgaacacctagcatctgca

SEQ ID NO: 2005 - RNA, 23 nt, synthetic construct
  source 1..23: mol_type = other RNA
  modified_base 1: mod_base = OTHER; note = 2'-O-methyluridine with a 3'-phosphorothioate linkage
  modified_base 2: mod_base = OTHER; note = 2'-fluorouridine with a 3'-phosphorothioate linkage
  modified_base 3: mod_base = cm
  modified_base 4: mod_base = cm
  modified_base 5: mod_base = OTHER; note = 2'-fluorouridine
  modified_base 6: mod_base = um
  modified_base 7: mod_base = OTHER; note = 2'-fluoroguanosine
  modified_base 8: mod_base = OTHER; note = 2'-O-methyladenosine
  modified_base 9: mod_base = OTHER; note = 2'-O-methyladenosine
  modified_base 10: mod_base = cm
  modified_base 11: mod_base = OTHER; note = 2'-O-methyladenosine
  modified_base 12: mod_base = cm
  modified_base 13: mod_base = cm
  modified_base 14: mod_base = OTHER; note = 2'-fluorouridine
  modified_base 15: mod_base = OTHER; note = 2'-O-methyladenosine
  modified_base 16: mod_base = OTHER; note = 2'-fluoroguanosine
  modified_base 17: mod_base = cm
  modified_base 18: mod_base = OTHER; note = 2'-O-methyladenosine
  modified_base 19: mod_base = um
  modified_base 20: mod_base = cm
  modified_base 21: mod_base = OTHER; note = 2'-O-methyluridine with a 3'-phosphorothioate linkage
  modified_base 22: mod_base = OTHER; note = 2'-O-methylguanosine with a 3'-phosphorothioate linkage
  modified_base 23: mod_base = cm
ttccttgaacacctagcatctgc

SEQ ID NO: 2006 - RNA, 23 nt, synthetic construct
  source 1..23: mol_type = other RNA
  modified_base 1: mod_base = OTHER; note = 2'-O-methyluridine with a 3'-phosphorothioate linkage
  modified_base 2: mod_base = OTHER; note = 2'-fluoroadenosine with a 3'-phosphorothioate linkage
  modified_base 3: mod_base = um
  modified_base 4: mod_base = gm
  modified_base 5: mod_base = OTHER; note = 2'-fluorocytidine
  modified_base 6: mod_base = um
  modified_base 7: mod_base = OTHER; note = 2'-fluorocytidine
  modified_base 8: mod_base = cm
  modified_base 9: mod_base = um
  modified_base 10: mod_base = um
  modified_base 11: mod_base = gm
  modified_base 12: mod_base = OTHER; note = 2'-O-methyladenosine
  modified_base 13: mod_base = OTHER; note = 2'-O-methyladenosine
  modified_base 14: mod_base = OTHER; note = 2'-fluorocytidine
  modified_base 15: mod_base = OTHER; note = 2'-O-methyladenosine
  modified_base 16: mod_base = OTHER; note = 2'-fluorocytidine
  modified_base 17: mod_base = cm
  modified_base 18: mod_base = um
  modified_base 19: mod_base = OTHER; note = 2'-O-methyladenosine
  modified_base 20: mod_base = gm
  modified_base 21: mod_base = OTHER; note = 2'-O-methylcytidine with a 3'-phosphorothioate linkage
  modified_base 22: mod_base = OTHER; note = 2'-O-methyladenosine with a 3'-phosphorothioate linkage
  modified_base 23: mod_base = um
tatgctccttgaacacctagcat

SEQ ID NO: 2007 - RNA, 23 nt, synthetic construct
  source 1..23: mol_type = other RNA
  modified_base 1: mod_base = OTHER; note = 2'-O-methyluridine with a 3'-phosphorothioate linkage
  modified_base 2: mod_base = OTHER; note = 2'-fluoroguanosine with a 3'-phosphorothioate linkage
  modified_base 3: mod_base = cm
  modified_base 4: mod_base = OTHER; note = 2'-O-methyladenosine
  modified_base 5: mod_base = OTHER; note = 2'-fluorouridine
  modified_base 6: mod_base = gm
  modified_base 7: mod_base = OTHER; note = 2'-fluorocytidine
  modified_base 8: mod_base = um
  modified_base 9: mod_base = cm
  modified_base 10: mod_base = cm
  modified_base 11: mod_base = um
  modified_base 12: mod_base = um
  modified_base 13: mod_base = gm
  modified_base 14: mod_base = OTHER; note = 2'-fluoroadenosine
  modified_base 15: mod_base = OTHER; note = 2'-O-methyladenosine
  modified_base 16: mod_base = OTHER; note = 2'-fluorocytidine
  modified_base 17: mod_base = OTHER; note = 2'-O-methyladenosine
  modified_base 18: mod_base = cm
  modified_base 19: mod_base = cm
  modified_base 20: mod_base = um
  modified_base 21: mod_base = OTHER; note = 2'-O-methyladenosine with a 3'-phosphorothioate linkage
  modified_base 22: mod_base = OTHER; note = 2'-O-methylguanosine with a 3'-phosphorothioate linkage
  modified_base 23: mod_base = cm
tgcatgctccttgaacacctagc

SEQ ID NO: 2008 - RNA, 23 nt, synthetic construct
  source 1..23: mol_type = other RNA
  modified_base 1: mod_base = OTHER; note = 2'-O-methyluridine with a 3'-phosphorothioate linkage
  modified_base 2: mod_base = OTHER; note = 2'-fluorouridine with a 3'-phosphorothioate linkage
  modified_base 3: mod_base = gm
  modified_base 4: mod_base = cm
  modified_base 5: mod_base = OTHER; note = 2'-fluoroadenosine
  modified_base 6: mod_base = um
  modified_base 7: mod_base = OTHER; note = 2'-fluoroguanosine
  modified_base 8: mod_base = cm
  modified_base 9: mod_base = um
  modified_base 10: mod_base = cm
  modified_base 11: mod_base = cm
  modified_base 12: mod_base = um
  modified_base 13: mod_base = um
  modified_base 14: mod_base = OTHER; note = 2'-fluoroguanosine
  modified_base 15: mod_base = OTHER; note = 2'-O-methyladenosine
  modified_base 16: mod_base = OTHER; note = 2'-fluoroadenosine
  modified_base 17: mod_base = cm
  modified_base 18: mod_base = OTHER; note = 2'-O-methyladenosine
  modified_base 19: mod_base = cm
  modified_base 20: mod_base = cm
  modified_base 21: mod_base = OTHER; note = 2'-O-methyluridine with a 3'-phosphorothioate linkage
  modified_base 22: mod_base = OTHER; note = 2'-O-methyladenosine with a 3'-phosphorothioate linkage
  modified_base 23: mod_base = gm
ttgcatgctccttgaacacctag

SEQ ID NO: 2009 - RNA, 23 nt, synthetic construct
  source 1..23: mol_type = other RNA
  modified_base 1: mod_base = OTHER; note = 2'-O-methyluridine with a 3'-phosphorothioate linkage
  modified_base 2: mod_base = OTHER; note = 2'-fluorouridine with a 3'-phosphorothioate linkage
  modified_base 3: mod_base = um
  modified_base 4: mod_base = gm
  modified_base 5: mod_base = OTHER; note = 2'-fluorocytidine
  modified_base 6: mod_base = OTHER; note = 2'-O-methyladenosine
  modified_base 7: mod_base = OTHER; note = 2'-fluorouridine
  modified_base 8: mod_base = gm
  modified_base 9: mod_base = cm
  modified_base 10: mod_base = um
  modified_base 11: mod_base = cm
  modified_base 12: mod_base = cm
  modified_base 13: mod_base = um
  modified_base 14: mod_base = OTHER; note = 2'-fluorouridine
  modified_base 15: mod_base = gm
  modified_base 16: mod_base = OTHER; note = 2'-fluoroadenosine
  modified_base 17: mod_base = OTHER; note = 2'-O-methyladenosine
  modified_base 18: mod_base = cm
  modified_base 19: mod_base = OTHER; note = 2'-O-methyladenosine
  modified_base 20: mod_base = cm
  modified_base 21: mod_base = OTHER; note = 2'-O-methylcytidine with a 3'-phosphorothioate linkage
  modified_base 22: mod_base = OTHER; note = 2'-O-methyluridine with a 3'-phosphorothioate linkage
  modified_base 23: mod_base = OTHER; note = 2'-O-methyladenosine
tttgcatgctccttgaacaccta

SEQ ID NO: 2010 - RNA, 23 nt, synthetic construct
  source 1..23: mol_type = other RNA
  modified_base 1: mod_base = OTHER; note = 2'-O-methyluridine with a 3'-phosphorothioate linkage
  modified_base 2: mod_base = OTHER; note = 2'-fluorocytidine with a 3'-phosphorothioate linkage
  modified_base 3: mod_base = um
  modified_base 4: mod_base = um
  modified_base 5: mod_base = OTHER; note = 2'-fluorouridine
  modified_base 6: mod_base = gm
  modified_base 7: mod_base = OTHER; note = 2'-fluorocytidine
  modified_base 8: mod_base = OTHER; note = 2'-O-methyladenosine
  modified_base 9: mod_base = um
  modified_base 10: mod_base = gm
  modified_base 11: mod_base = cm
  modified_base 12: mod_base = um
  modified_base 13: mod_base = cm
  modified_base 14: mod_base = OTHER; note = 2'-fluorocytidine
  modified_base 15: mod_base = um
  modified_base 16: mod_base = OTHER; note = 2'-fluorouridine
  modified_base 17: mod_base = gm
  modified_base 18: mod_base = OTHER; note = 2'-O-methyladenosine
  modified_base 19: mod_base = OTHER; note = 2'-O-methyladenosine
  modified_base 20: mod_base = cm
  modified_base 21: mod_base = OTHER; note = 2'-O-methyladenosine with a 3'-phosphorothioate linkage
  modified_base 22: mod_base = OTHER; note = 2'-O-methylcytidine with a 3'-phosphorothioate linkage
  modified_base 23: mod_base = cm
tctttgcatgctccttgaacacc

SEQ ID NO: 2011 - RNA, 23 nt, synthetic construct
  source 1..23: mol_type = other RNA
  modified_base 1: mod_base = OTHER; note = 2'-O-methyluridine with a 3'-phosphorothioate linkage
  modified_base 2: mod_base = OTHER; note = 2'-fluorouridine with a 3'-phosphorothioate linkage
  modified_base 3: mod_base = cm
  modified_base 4: mod_base = um
  modified_base 5: mod_base = OTHER; note = 2'-fluorouridine
  modified_base 6: mod_base = um
  modified_base 7: mod_base = OTHER; note = 2'-fluoroguanosine
  modified_base 8: mod_base = cm
  modified_base 9: mod_base = OTHER; note = 2'-O-methyladenosine
  modified_base 10: mod_base = um
  modified_base 11: mod_base = gm
  modified_base 12: mod_base = cm
  modified_base 13: mod_base = um
  modified_base 14: mod_base = OTHER; note = 2'-fluorocytidine
  modified_base 15: mod_base = cm
  modified_base 16: mod_base = OTHER; note = 2'-fluorouridine
  modified_base 17: mod_base = um
  modified_base 18: mod_base = gm
  modified_base 19: mod_base = OTHER; note = 2'-O-methyladenosine
  modified_base 20: mod_base = OTHER; note = 2'-O-methyladenosine
  modified_base 21: mod_base = OTHER; note = 2'-O-methylcytidine with a 3'-phosphorothioate linkage
  modified_base 22: mod_base = OTHER; note = 2'-O-methyladenosine with a 3'-phosphorothioate linkage
  modified_base 23: mod_base = cm
ttctttgcatgctccttgaacac

SEQ ID NO: 2012 - RNA, 23 nt, synthetic construct
  source 1..23: mol_type = other RNA
  modified_base 1: mod_base = OTHER; note = 2'-O-methyluridine with a 3'-phosphorothioate linkage
  modified_base 2: mod_base = OTHER; note = 2'-fluoroadenosine with a 3'-phosphorothioate linkage
  modified_base 3: mod_base = OTHER; note = 2'-O-methyladenosine
  modified_base 4: mod_base = um
  modified_base 5: mod_base = OTHER; note = 2'-fluorouridine
  modified_base 6: mod_base = cm
  modified_base 7: mod_base = OTHER; note = 2'-fluoroguanosine
  modified_base 8: mod_base = gm
  modified_base 9: mod_base = gm
  modified_base 10: mod_base = cm
  modified_base 11: mod_base = OTHER; note = 2'-O-methyladenosine
  modified_base 12: mod_base = OTHER; note = 2'-O-methyladenosine
  modified_base 13: mod_base = gm
  modified_base 14: mod_base = OTHER; note = 2'-fluorocytidine
  modified_base 15: mod_base = um
  modified_base 16: mod_base = OTHER; note = 2'-fluoroguanosine
  modified_base 17: mod_base = cm
  modified_base 18: mod_base = cm
  modified_base 19: mod_base = gm
  modified_base 20: mod_base = gm
  modified_base 21: mod_base = OTHER; note = 2'-O-methylguanosine with a 3'-phosphorothioate linkage
  modified_base 22: mod_base = OTHER; note = 2'-O-methylcytidine with a 3'-phosphorothioate linkage
  modified_base 23: mod_base = OTHER; note = 2'-O-methyladenosine
taattcgggcaagctgccgggca

SEQ ID NO: 2013 - RNA, 23 nt, synthetic construct
  source 1..23: mol_type = other RNA
  modified_base 1: mod_base = OTHER; note = 2'-O-methyluridine with a 3'-phosphorothioate linkage
  modified_base 2: mod_base = OTHER; note = 2'-fluoroadenosine with a 3'-phosphorothioate linkage
  modified_base 3: mod_base = cm
  modified_base 4: mod_base = OTHER; note = 2'-O-methyladenosine
  modified_base 5: mod_base = OTHER; note = 2'-fluoroadenosine
  modified_base 6: mod_base = um
  modified_base 7: mod_base = OTHER; note = 2'-fluorouridine
  modified_base 8: mod_base = cm
  modified_base 9: mod_base = gm
  modified_base 10: mod_base = gm
  modified_base 11: mod_base = gm
  modified_base 12: mod_base = cm
  modified_base 13: mod_base = OTHER; note = 2'-O-methyladenosine
  modified_base 14: mod_base = OTHER; note = 2'-fluoroadenosine
  modified_base 15: mod_base = gm
  modified_base 16: mod_base = OTHER; note = 2'-fluorocytidine
  modified_base 17: mod_base = um
  modified_base 18: mod_base = gm
  modified_base 19: mod_base = cm
  modified_base 20: mod_base = cm
  modified_base 21: mod_base = OTHER; note = 2'-O-methylguanosine with a 3'-phosphorothioate linkage
  modified_base 22: mod_base = OTHER; note = 2'-O-methylguanosine with a 3'-phosphorothioate linkage
  modified_base 23: mod_base = gm
tacaattcgggcaagctgccggg

SEQ ID NO: 2014 - RNA, 23 nt, synthetic construct
  source 1..23: mol_type = other RNA
  modified_base 1: mod_base = OTHER; note = 2'-O-methyluridine with a 3'-phosphorothioate linkage
  modified_base 2: mod_base = OTHER; note = 2'-fluoroadenosine with a 3'-phosphorothioate linkage
  modified_base 3: mod_base = OTHER; note = 2'-O-methyladenosine
  modified_base 4: mod_base = gm
  modified_base 5: mod_base = OTHER; note = 2'-fluoroadenosine
  modified_base 6: mod_base = um
  modified_base 7: mod_base = OTHER; note = 2'-fluoroguanosine
  modified_base 8: mod_base = um
  modified_base 9: mod_base = cm
  modified_base 10: mod_base = cm
  modified_base 11: mod_base = um
  modified_base 12: mod_base = gm
  modified_base 13: mod_base = cm
  modified_base 14: mod_base = OTHER; note = 2'-fluorouridine
  modified_base 15: mod_base = gm
  modified_base 16: mod_base = OTHER; note = 2'-fluorocytidine
  modified_base 17: mod_base = cm
  modified_base 18: mod_base = OTHER; note = 2'-O-methyladenosine
  modified_base 19: mod_base = OTHER; note = 2'-O-methyladenosine
  modified_base 20: mod_base = um
  modified_base 21: mod_base = OTHER; note = 2'-O-methylguanosine with a 3'-phosphorothioate linkage
  modified_base 22: mod_base = OTHER; note = 2'-O-methylcytidine with a 3'-phosphorothioate linkage
  modified_base 23: mod_base = um
taagatgtcctgctgccaatgct

SEQ ID NO: 2015 - RNA, 23 nt, synthetic construct
  source 1..23: mol_type = other RNA
  modified_base 1: mod_base = OTHER; note = 2'-O-methyluridine with a 3'-phosphorothioate linkage
  modified_base 2: mod_base = OTHER; note = 2'-fluorocytidine with a 3'-phosphorothioate linkage
  modified_base 3: mod_base = OTHER; note = 2'-O-methyladenosine
  modified_base 4: mod_base = OTHER; note = 2'-O-methyladenosine
  modified_base 5: mod_base = OTHER; note = 2'-fluoroguanosine
  modified_base 6: mod_base = OTHER; note = 2'-O-methyladenosine
  modified_base 7: mod_base = OTHER; note = 2'-fluorouridine
  modified_base 8: mod_base = gm
  modified_base 9: mod_base = um
  modified_base 10: mod_base = cm
  modified_base 11: mod_base = cm
  modified_base 12: mod_base = um
  modified_base 13: mod_base = gm
  modified_base 14: mod_base = OTHER; note = 2'-fluorocytidine
  modified_base 15: mod_base = um
  modified_base 16: mod_base = OTHER; note = 2'-fluoroguanosine
  modified_base 17: mod_base = cm
  modified_base 18: mod_base = cm
  modified_base 19: mod_base = OTHER; note = 2'-O-methyladenosine
  modified_base 20: mod_base = OTHER; note = 2'-O-methyladenosine
  modified_base 21: mod_base = OTHER; note = 2'-O-methyluridine with a 3'-phosphorothioate linkage
  modified_base 22: mod_base = OTHER; note = 2'-O-methylguanosine with a 3'-phosphorothioate linkage
  modified_base 23: mod_base = cm
tcaagatgtcctgctgccaatgc

SEQ ID NO: 2016 - RNA, 23 nt, synthetic construct
  source 1..23: mol_type = other RNA
  modified_base 1: mod_base = OTHER; note = 2'-O-methyluridine with a 3'-phosphorothioate linkage
  modified_base 2: mod_base = OTHER; note = 2'-fluoroguanosine with a 3'-phosphorothioate linkage
  modified_base 3: mod_base = OTHER; note = 2'-O-methyladenosine
  modified_base 4: mod_base = cm
  modified_base 5: mod_base = OTHER; note = 2'-fluoroadenosine
  modified_base 6: mod_base = OTHER; note = 2'-O-methyladenosine
  modified_base 7: mod_base = OTHER; note = 2'-fluoroguanosine
  modified_base 8: mod_base = OTHER; note = 2'-O-methyladenosine
  modified_base 9: mod_base = um
  modified_base 10: mod_base = gm
  modified_base 11: mod_base = um
  modified_base 12: mod_base = cm
  modified_base 13: mod_base = cm
  modified_base 14: mod_base = OTHER; note = 2'-fluorouridine
  modified_base 15: mod_base = gm
  modified_base 16: mod_base = OTHER; note = 2'-fluorocytidine
  modified_base 17: mod_base = um
  modified_base 18: mod_base = gm
  modified_base 19: mod_base = cm
  modified_base 20: mod_base = cm
  modified_base 21: mod_base = OTHER; note = 2'-O-methyladenosine with a 3'-phosphorothioate linkage
  modified_base 22: mod_base = OTHER; note = 2'-O-methyladenosine with a 3'-phosphorothioate linkage
  modified_base 23: mod_base = um
tgacaagatgtcctgctgccaat

SEQ ID NO: 2017 - RNA, 23 nt, synthetic construct
  source 1..23: mol_type = other RNA
  modified_base 1: mod_base = OTHER; note = 2'-O-methyluridine with a 3'-phosphorothioate linkage
  modified_base 2: mod_base = OTHER; note = 2'-fluoroadenosine with a 3'-phosphorothioate linkage
  modified_base 3: mod_base = OTHER; note = 2'-O-methyladenosine
  modified_base 4: mod_base = gm
  modified_base 5: mod_base = OTHER; note = 2'-fluoroguanosine
  modified_base 6: mod_base = cm
  modified_base 7: mod_base = OTHER; note = 2'-fluorocytidine
  modified_base 8: mod_base = um
  modified_base 9: mod_base = cm
  modified_base 10: mod_base = um
  modified_base 11: mod_base = cm
  modified_base 12: mod_base = um
  modified_base 13: mod_base = gm
  modified_base 14: mod_base = OTHER; note = 2'-fluoroadenosine
  modified_base 15: mod_base = OTHER; note = 2'-O-methyladenosine
  modified_base 16: mod_base = OTHER; note = 2'-fluorocytidine
  modified_base 17: mod_base = OTHER; note = 2'-O-methyladenosine
  modified_base 18: mod_base = OTHER; note = 2'-O-methyladenosine
  modified_base 19: mod_base = OTHER; note = 2'-O-methyladenosine
  modified_base 20: mod_base = um
  modified_base 21: mod_base = OTHER; note = 2'-O-methyladenosine with a 3'-phosphorothioate linkage
  modified_base 22: mod_base = OTHER; note = 2'-O-methylguanosine with a 3'-phosphorothioate linkage
  modified_base 23: mod_base = cm
taaggcctctctgaacaaatagc

SEQ ID NO: 2018 - RNA, 23 nt, synthetic construct
  source 1..23: mol_type = other RNA
  modified_base 1: mod_base = OTHER; note = 2'-O-methyluridine with a 3'-phosphorothioate linkage
  modified_base 2: mod_base = OTHER; note = 2'-fluoroadenosine with a 3'-phosphorothioate linkage
  modified_base 3: mod_base = gm
  modified_base 4: mod_base = cm
  modified_base 5: mod_base = OTHER; note = 2'-fluorouridine
  modified_base 6: mod_base = cm
  modified_base 7: mod_base = OTHER; note = 2'-fluorouridine
  modified_base 8: mod_base = gm
  modified_base 9: mod_base = OTHER; note = 2'-O-methyladenosine
  modified_base 10: mod_base = um
  modified_base 11: mod_base = OTHER; note = 2'-O-methyladenosine
  modified_base 12: mod_base = um
  modified_base 13: mod_base = cm
  modified_base 14: mod_base = OTHER; note = 2'-fluorouridine
  modified_base 15: mod_base = um
  modified_base 16: mod_base = OTHER; note = 2'-fluorouridine
  modified_base 17: mod_base = OTHER; note = 2'-O-methyladenosine
  modified_base 18: mod_base = gm
  modified_base 19: mod_base = um
  modified_base 20: mod_base = OTHER; note = 2'-O-methyladenosine
  modified_base 21: mod_base = OTHER; note = 2'-O-methyladenosine with a 3'-phosphorothioate linkage
  modified_base 22: mod_base = OTHER; note = 2'-O-methyladenosine with a 3'-phosphorothioate linkage
  modified_base 23: mod_base = gm
tagctctgatatctttagtaaag

SEQ ID NO: 2019 - RNA, 23 nt, synthetic construct
  source 1..23: mol_type = other RNA
  modified_base 1: mod_base = OTHER; note = 2'-O-methyluridine with a 3'-phosphorothioate linkage
  modified_base 2: mod_base = OTHER; note = 2'-fluorouridine with a 3'-phosphorothioate linkage
  modified_base 3: mod_base = um
  modified_base 4: mod_base = OTHER; note = 2'-O-methyladenosine
  modified_base 5: mod_base = OTHER; note = 2'-fluorocytidine
  modified_base 6: mod_base = OTHER; note = 2'-O-methyladenosine
  modified_base 7: mod_base = OTHER; note = 2'-fluoroadenosine
  modified_base 8: mod_base = cm
  modified_base 9: mod_base = OTHER; note = 2'-O-methyladenosine
  modified_base 10: mod_base = um
  modified_base 11: mod_base = OTHER; note = 2'-O-methyladenosine
  modified_base 12: mod_base = um
  modified_base 13: mod_base = OTHER; note = 2'-O-methyladenosine
  modified_base 14: mod_base = OTHER; note = 2'-fluorocytidine
  modified_base 15: mod_base = OTHER; note = 2'-O-methyladenosine
  modified_base 16: mod_base = OTHER; note = 2'-fluoroguanosine
  modified_base 17: mod_base = OTHER; note = 2'-O-methyladenosine
  modified_base 18: mod_base = um
  modified_base 19: mod_base = um
  modified_base 20: mod_base = um
  modified_base 21: mod_base = OTHER; note = 2'-O-methylguanosine with a 3'-phosphorothioate linkage
  modified_base 22: mod_base = OTHER; note = 2'-O-methyladenosine with a 3'-phosphorothioate linkage
  modified_base 23: mod_base = um
tttacaacatatacagatttgat

SEQ ID NO: 2020 - RNA, 23 nt, synthetic construct
  source 1..23: mol_type = other RNA
  modified_base 1: mod_base = OTHER; note = 2'-O-methyluridine with a 3'-phosphorothioate linkage
  modified_base 2: mod_base = OTHER; note = 2'-fluoroadenosine with a 3'-phosphorothioate linkage
  modified_base 3: mod_base = um
  modified_base 4: mod_base = um
  modified_base 5: mod_base = OTHER; note = 2'-fluoroadenosine
  modified_base 6: mod_base = cm
  modified_base 7: mod_base = OTHER; note = 2'-fluoroadenosine
  modified_base 8: mod_base = OTHER; note = 2'-O-methyladenosine
  modified_base 9: mod_base = cm
  modified_base 10: mod_base = OTHER; note = 2'-O-methyladenosine
  modified_base 11: mod_base = um
  modified_base 12: mod_base = OTHER; note = 2'-O-methyladenosine
  modified_base 13: mod_base = um
  modified_base 14: mod_base = OTHER; note = 2'-fluoroadenosine
  modified_base 15: mod_base = cm
  modified_base 16: mod_base = OTHER; note = 2'-fluoroadenosine
  modified_base 17: mod_base = gm
  modified_base 18: mod_base = OTHER; note = 2'-O-methyladenosine
  modified_base 19: mod_base = um
  modified_base 20: mod_base = um
  modified_base 21: mod_base = OTHER; note = 2'-O-methyluridine with a 3'-phosphorothioate linkage
  modified_base 22: mod_base = OTHER; note = 2'-O-methylguanosine with a 3'-phosphorothioate linkage
  modified_base 23: mod_base = OTHER; note = 2'-O-methyladenosine
tattacaacatatacagatttga

SEQ ID NO: 2021 - RNA, 23 nt, synthetic construct
  source 1..23: mol_type = other RNA
  modified_base 1: mod_base = OTHER; note = 2'-O-methyluridine with a 3'-phosphorothioate linkage
  modified_base 2: mod_base = OTHER; note = 2'-fluorocytidine with a 3'-phosphorothioate linkage
  modified_base 3: mod_base = um
  modified_base 4: mod_base = OTHER; note = 2'-O-methyladenosine
  modified_base 5: mod_base = OTHER; note = 2'-fluoroguanosine
  modified_base 6: mod_base = OTHER; note = 2'-O-methyladenosine
  modified_base 7: mod_base = OTHER; note = 2'-fluoroguanosine
  modified_base 8: mod_base = um
  modified_base 9: mod_base = OTHER; note = 2'-O-methyladenosine
  modified_base 10: mod_base = um
  modified_base 11: mod_base = um
  modified_base 12: mod_base = um
  modified_base 13: mod_base = um
  modified_base 14: mod_base = OTHER; note = 2'-fluoroadenosine
  modified_base 15: mod_base = um
  modified_base 16: mod_base = OTHER; note = 2'-fluorocytidine
  modified_base 17: mod_base = OTHER; note = 2'-O-methyladenosine
  modified_base 18: mod_base = gm
  modified_base 19: mod_base = um
  modified_base 20: mod_base = OTHER; note = 2'-O-methyladenosine
  modified_base 21: mod_base = OTHER; note = 2'-O-methylcytidine with a 3'-phosphorothioate linkage
  modified_base 22: mod_base = OTHER; note = 2'-O-methyladenosine with a 3'-phosphorothioate linkage
  modified_base 23: mod_base = cm
tctagagtattttatcagtacac

SEQ ID NO: 2022 - RNA, 23 nt, synthetic construct
  source 1..23: mol_type = other RNA
  modified_base 1: mod_base = OTHER; note = 2'-O-methyluridine with a 3'-phosphorothioate linkage
  modified_base 2: mod_base = OTHER; note = 2'-fluoroadenosine with a 3'-phosphorothioate linkage
  modified_base 3: mod_base = gm
  modified_base 4: mod_base = cm
  modified_base 5: mod_base = OTHER; note = 2'-fluorocytidine
  modified_base 6: mod_base = OTHER; note = 2'-O-methyladenosine
  modified_base 7: mod_base = OTHER; note = 2'-fluoroguanosine
  modified_base 8: mod_base = gm
  modified_base 9: mod_base = gm
  modified_base 10: mod_base = um
  modified_base 11: mod_base = um
  modified_base 12: mod_base = um
  modified_base 13: mod_base = cm
  modified_base 14: mod_base = OTHER; note = 2'-fluorocytidine
  modified_base 15: mod_base = um
  modified_base 16: mod_base = OTHER; note = 2'-fluoroguanosine
  modified_base 17: mod_base = gm
  modified_base 18: mod_base = OTHER; note = 2'-O-methyladenosine
  modified_base 19: mod_base = cm
  modified_base 20: mod_base = OTHER; note = 2'-O-methyladenosine
  modified_base 21: mod_base = OTHER; note = 2'-O-methyladenosine with a 3'-phosphorothioate linkage
  modified_base 22: mod_base = OTHER; note = 2'-O-methylcytidine with a 3'-phosphorothioate linkage
  modified_base 23: mod_base = OTHER; note = 2'-O-methyladenosine
tagccagggtttcctggacaaca

SEQ ID NO: 2023 - RNA, 23 nt, synthetic construct
  source 1..23: mol_type = other RNA
  modified_base 1: mod_base = OTHER; note = 2'-O-methyluridine with a 3'-phosphorothioate linkage
  modified_base 2: mod_base = OTHER; note = 2'-fluoroguanosine with a 3'-phosphorothioate linkage
  modified_base 3: mod_base = cm
  modified_base 4: mod_base = OTHER; note = 2'-O-methyladenosine
  modified_base 5: mod_base = OTHER; note = 2'-fluoroadenosine
  modified_base 6: mod_base = gm
  modified_base 7: mod_base = OTHER; note = 2'-fluorocytidine
  modified_base 8: mod_base = cm
  modified_base 9: mod_base = OTHER; note = 2'-O-methyladenosine
  modified_base 10: mod_base = gm
  modified_base 11: mod_base = gm
  modified_base 12: mod_base = gm
  modified_base 13: mod_base = um
  modified_base 14: mod_base = OTHER; note = 2'-fluorouridine
  modified_base 15: mod_base = um
  modified_base 16: mod_base = OTHER; note = 2'-fluorocytidine
  modified_base 17: mod_base = cm
  modified_base 18: mod_base = um
  modified_base 19: mod_base = gm
  modified_base 20: mod_base = gm
  modified_base 21: mod_base = OTHER; note = 2'-O-methyladenosine with a 3'-phosphorothioate linkage
  modified_base 22: mod_base = OTHER; note = 2'-O-methylcytidine with a 3'-phosphorothioate linkage
  modified_base 23: mod_base = OTHER; note = 2'-O-methyladenosine
tgcaagccagggtttcctggaca

SEQ ID NO: 2024 - RNA, 23 nt, synthetic construct
  source 1..23: mol_type = other RNA
  modified_base 1: mod_base = OTHER; note = 2'-O-methyluridine with a 3'-phosphorothioate linkage
  modified_base 2: mod_base = OTHER; note = 2'-fluorouridine with a 3'-phosphorothioate linkage
  modified_base 3: mod_base = cm
  modified_base 4: mod_base = OTHER; note = 2'-O-methyladenosine
  modified_base 5: mod_base = OTHER; note = 2'-fluoroguanosine
  modified_base 6: mod_base = OTHER; note = 2'-O-methyladenosine
  modified_base 7: mod_base = OTHER; note = 2'-fluoroguanosine
  modified_base 8: mod_base = um
  modified_base 9: mod_base = cm
  modified_base 10: mod_base = cm
  modified_base 11: mod_base = OTHER; note = 2'-O-methyladenosine
  modified_base 12: mod_base = um
  modified_base 13: mod_base = cm
  modified_base 14: mod_base = OTHER; note = 2'-fluorouridine
  modified_base 15: mod_base = um
  modified_base 16: mod_base = OTHER; note = 2'-fluorocytidine
  modified_base 17: mod_base = um
  modified_base 18: mod_base = OTHER; note = 2'-O-methyladenosine
  modified_base 19: mod_base = cm
  modified_base 20: mod_base = OTHER; note = 2'-O-methyladenosine
  modified_base 21: mod_base = OTHER; note = 2'-O-methyladenosine with a 3'-phosphorothioate linkage
  modified_base 22: mod_base = OTHER; note = 2'-O-methylguanosine with a 3'-phosphorothioate linkage
  modified_base 23: mod_base = OTHER; note = 2'-O-methyladenosine
ttcagagtccatcttctacaaga

SEQ ID NO: 2025 - RNA, 23 nt, synthetic construct
  source 1..23: mol_type = other RNA
  modified_base 1: mod_base = OTHER; note = 2'-O-methyluridine with a 3'-phosphorothioate linkage
  modified_base 2: mod_base = OTHER; note = 2'-fluorouridine with a 3'-phosphorothioate linkage
  modified_base 3: mod_base = um
  modified_base 4: mod_base = cm
  modified_base 5: mod_base = OTHER; note = 2'-fluoroadenosine
  modified_base 6: mod_base = gm
  modified_base 7: mod_base = OTHER; note = 2'-fluoroadenosine
  modified_base 8: mod_base = gm
  modified_base 9: mod_base = um
  modified_base 10: mod_base = cm
  modified_base 11: mod_base = cm
  modified_base 12: mod_base = OTHER; note = 2'-O-methyladenosine
  modified_base 13: mod_base = um
  modified_base 14: mod_base = OTHER; note = 2'-fluorocytidine
  modified_base 15: mod_base = um
  modified_base 16: mod_base = OTHER; note = 2'-fluorouridine
  modified_base 17: mod_base = cm
  modified_base 18: mod_base = um
  modified_base 19: mod_base = OTHER; note = 2'-O-methyladenosine
  modified_base 20: mod_base = cm
  modified_base 21: mod_base = OTHER; note = 2'-O-methyladenosine with a 3'-phosphorothioate linkage
  modified_base 22: mod_base = OTHER; note = 2'-O-methyladenosine with a 3'-phosphorothioate linkage
  modified_base 23: mod_base = gm
tttcagagtccatcttctacaag

SEQ ID NO: 2026 - RNA, 23 nt, synthetic construct
  source 1..23: mol_type = other RNA
  modified_base 1: mod_base = OTHER; note = 2'-O-methyluridine with a 3'-phosphorothioate linkage
  modified_base 2: mod_base = OTHER; note = 2'-fluoroadenosine with a 3'-phosphorothioate linkage
  modified_base 3: mod_base = gm
  modified_base 4: mod_base = um
  modified_base 5: mod_base = OTHER; note = 2'-fluoroadenosine
  modified_base 6: mod_base = OTHER; note = 2'-O-methyladenosine
  modified_base 7: mod_base = OTHER; note = 2'-fluorouridine
  modified_base 8: mod_base = um
  modified_base 9: mod_base = gm
  modified_base 10: mod_base = um
  modified_base 11: mod_base = OTHER; note = 2'-O-methyladenosine
  modified_base 12: mod_base = cm
  modified_base 13: mod_base = OTHER; note = 2'-O-methyladenosine
  modified_base 14: mod_base = OTHER; note = 2'-fluoroadenosine
  modified_base 15: mod_base = OTHER; note = 2'-O-methyladenosine
  modified_base 16: mod_base = OTHER; note = 2'-fluoroadenosine
  modified_base 17: mod_base = cm
  modified_base 18: mod_base = OTHER; note = 2'-O-methyladenosine
  modified_base 19: mod_base = um
  modified_base 20: mod_base = um
  modified_base 21: mod_base = OTHER; note = 2'-O-methyladenosine with a 3'-phosphorothioate linkage
  modified_base 22: mod_base = OTHER; note = 2'-O-methyladenosine with a 3'-phosphorothioate linkage
  modified_base 23: mod_base = um
tagtaattgtacaaaacattaat

SEQ ID NO: 2027 - RNA, 23 nt, synthetic construct
  source 1..23: mol_type = other RNA
  modified_base 1: mod_base = OTHER; note = 2'-O-methyluridine with a 3'-phosphorothioate linkage
  modified_base 2: mod_base = OTHER; note = 2'-fluoroadenosine with a 3'-phosphorothioate linkage
  modified_base 3: mod_base = um
  modified_base 4: mod_base = um
  modified_base 5: mod_base = OTHER; note = 2'-fluorocytidine
  modified_base 6: mod_base = um
  modified_base 7: mod_base = OTHER; note = 2'-fluoroadenosine
  modified_base 8: mod_base = um
  modified_base 9: mod_base = OTHER; note = 2'-O-methyladenosine
  modified_base 10: mod_base = OTHER; note = 2'-O-methyladenosine
  modified_base 11: mod_base = cm
  modified_base 12: mod_base = OTHER; note = 2'-O-methyladenosine
  modified_base 13: mod_base = OTHER; note = 2'-O-methyladenosine
  modified_base 14: mod_base = OTHER; note = 2'-fluoroadenosine
  modified_base 15: mod_base = OTHER; note = 2'-O-methyladenosine
  modified_base 16: mod_base = OTHER; note = 2'-fluorouridine
  modified_base 17: mod_base = gm
  modified_base 18: mod_base = um
  modified_base 19: mod_base = OTHER; note = 2'-O-methyladenosine
  modified_base 20: mod_base = um
  modified_base 21: mod_base = OTHER; note = 2'-O-methyladenosine with a 3'-phosphorothioate linkage
  modified_base 22: mod_base = OTHER; note = 2'-O-methylcytidine with a 3'-phosphorothioate linkage
  modified_base 23: mod_base = OTHER; note = 2'-O-methyladenosine
tattctataacaaaatgtataca

SEQ ID NO: 2028 - RNA, 23 nt, synthetic construct
  source 1..23: mol_type = other RNA
  modified_base 1: mod_base = OTHER; note = 2'-O-methyluridine with a 3'-phosphorothioate linkage
  modified_base 2: mod_base = OTHER; note = 2'-fluoroguanosine with a 3'-phosphorothioate linkage
  modified_base 3: mod_base = um
  modified_base 4: mod_base = OTHER; note = 2'-O-methyladenosine
  modified_base 5: mod_base = OTHER; note = 2'-fluorouridine
  modified_base 6: mod_base = um
  modified_base 7: mod_base = OTHER; note = 2'-fluorocytidine
  modified_base 8: mod_base = um
  modified_base 9: mod_base = OTHER; note = 2'-O-methyladenosine
  modified_base 10: mod_base = um
  modified_base 11: mod_base = OTHER; note = 2'-O-methyladenosine
  modified_base 12: mod_base = OTHER; note = 2'-O-methyladenosine
  modified_base 13: mod_base = cm
  modified_base 14: mod_base = OTHER; note = 2'-fluoroadenosine
  modified_base 15: mod_base = OTHER; note = 2'-O-methyladenosine
  modified_base 16: mod_base = OTHER; note = 2'-fluoroadenosine
  modified_base 17: mod_base = OTHER; note = 2'-O-methyladenosine
  modified_base 18: mod_base = um
  modified_base 19: mod_base = gm
  modified_base 20: mod_base = um
  modified_base 21: mod_base = OTHER; note = 2'-O-methyladenosine with a 3'-phosphorothioate linkage
  modified_base 22: mod_base = OTHER; note = 2'-O-methyluridine with a 3'-phosphorothioate linkage
  modified_base 23: mod_base = OTHER; note = 2'-O-methyladenosine
tgtattctataacaaaatgtata

SEQ ID NO: 2029 - RNA, 23 nt, synthetic construct
  source 1..23: mol_type = other RNA
  modified_base 1: mod_base = OTHER; note = 2'-O-methyluridine with a 3'-phosphorothioate linkage
  modified_base 2: mod_base = OTHER; note = 2'-fluoroadenosine with a 3'-phosphorothioate linkage
  modified_base 3: mod_base = gm
  modified_base 4: mod_base = um
  modified_base 5: mod_base = OTHER; note = 2'-fluoroadenosine
  modified_base 6: mod_base = um
  modified_base 7: mod_base = OTHER; note = 2'-fluorouridine
  modified_base 8: mod_base = cm
  modified_base 9: mod_base = um
  modified_base 10: mod_base = OTHER; note = 2'-O-methyladenosine
  modified_base 11: mod_base = um
  modified_base 12: mod_base = OTHER; note = 2'-O-methyladenosine
  modified_base 13: mod_base = OTHER; note = 2'-O-methyladenosine
  modified_base 14: mod_base = OTHER; note = 2'-fluorocytidine
  modified_base 15: mod_base = OTHER; note = 2'-O-methyladenosine
  modified_base 16: mod_base = OTHER; note = 2'-fluoroadenosine
  modified_base 17: mod_base = OTHER; note = 2'-O-methyladenosine
  modified_base 18: mod_base = OTHER; note = 2'-O-methyladenosine
  modified_base 19: mod_base = um
  modified_base 20: mod_base = gm
  modified_base 21: mod_base = OTHER; note = 2'-O-methyluridine with a 3'-phosphorothioate linkage
  modified_base 22: mod_base = OTHER; note = 2'-O-methyladenosine with a 3'-phosphorothioate linkage
  modified_base 23: mod_base = um
tagtattctataacaaaatgtat

SEQ ID NO: 2030 - RNA, 23 nt, synthetic construct
  source 1..23: mol_type = other RNA
  modified_base 1: mod_base = OTHER; note = 2'-O-methyluridine with a 3'-phosphorothioate linkage
  modified_base 2: mod_base = OTHER; note = 2'-fluoroadenosine with a 3'-phosphorothioate linkage
  modified_base 3: mod_base = OTHER; note = 2'-O-methyladenosine
  modified_base 4: mod_base = OTHER; note = 2'-O-methyladenosine
  modified_base 5: mod_base = OTHER; note = 2'-fluoroadenosine
  modified_base 6: mod_base = OTHER; note = 2'-O-methyladenosine
  modified_base 7: mod_base = OTHER; note = 2'-fluoroguanosine
  modified_base 8: mod_base = um
  modified_base 9: mod_base = cm
  modified_base 10: mod_base = um
  modified_base 11: mod_base = um
  modified_base 12: mod_base = gm
  modified_base 13: mod_base = OTHER; note = 2'-O-methyladenosine
  modified_base 14: mod_base = OTHER; note = 2'-fluorocytidine
  modified_base 15: mod_base = OTHER; note = 2'-O-methyladenosine
  modified_base 16: mod_base = OTHER; note = 2'-fluoroadenosine
  modified_base 17: mod_base = cm
  modified_base 18: mod_base = OTHER; note = 2'-O-methyladenosine
  modified_base 19: mod_base = um
  modified_base 20: mod_base = um
  modified_base 21: mod_base = OTHER; note = 2'-O-methylguanosine with a 3'-phosphorothioate linkage
  modified_base 22: mod_base = OTHER; note = 2'-O-methyluridine with a 3'-phosphorothioate linkage
  modified_base 23: mod_base = OTHER; note = 2'-O-methyladenosine
taaaaagtcttgacaacattgta

SEQ ID NO: 2031 - RNA, 23 nt, synthetic construct
  source 1..23: mol_type = other RNA
  modified_base 1: mod_base = OTHER; note = 2'-O-methyluridine with a 3'-phosphorothioate linkage
  modified_base 2: mod_base = OTHER; note = 2'-fluoroguanosine with a 3'-phosphorothioate linkage
  modified_base 3: mod_base = OTHER; note = 2'-O-methyladenosine
  modified_base 4: mod_base = OTHER; note = 2'-O-methyladenosine
  modified_base 5: mod_base = OTHER; note = 2'-fluoroadenosine
  modified_base 6: mod_base = OTHER; note = 2'-O-methyladenosine
  modified_base 7: mod_base = OTHER; note = 2'-fluoroadenosine
  modified_base 8: mod_base = gm
  modified_base 9: mod_base = um
  modified_base 10: mod_base = cm
  modified_base 11: mod_base = um
  modified_base 12: mod_base = um
  modified_base 13: mod_base = gm
  modified_base 14: mod_base = OTHER; note = 2'-fluoroadenosine
  modified_base 15: mod_base = cm
  modified_base 16: mod_base = OTHER; note = 2'-fluoroadenosine
  modified_base 17: mod_base = OTHER; note = 2'-O-methyladenosine
  modified_base 18: mod_base = cm
  modified_base 19: mod_base = OTHER; note = 2'-O-methyladenosine
  modified_base 20: mod_base = um
  modified_base 21: mod_base = OTHER; note = 2'-O-methyluridine with a 3'-phosphorothioate linkage
  modified_base 22: mod_base = OTHER; note = 2'-O-methylguanosine with a 3'-phosphorothioate linkage
  modified_base 23: mod_base = um
tgaaaaagtcttgacaacattgt

SEQ ID NO: 2032 - RNA, 23 nt, synthetic construct
  source 1..23: mol_type = other RNA
  modified_base 1: mod_base = OTHER; note = 2'-O-methyluridine with a 3'-phosphorothioate linkage
  modified_base 2: mod_base = OTHER; note = 2'-fluorocytidine with a 3'-phosphorothioate linkage
  modified_base 3: mod_base = gm
  modified_base 4: mod_base = OTHER; note = 2'-O-methyladenosine
  modified_base 5: mod_base = OTHER; note = 2'-fluoroadenosine
  modified_base 6: mod_base = OTHER; note = 2'-O-methyladenosine
  modified_base 7: mod_base = OTHER; note = 2'-fluoroadenosine
  modified_base 8: mod_base = OTHER; note = 2'-O-methyladenosine
  modified_base 9: mod_base = gm
  modified_base 10: mod_base = um
  modified_base 11: mod_base = cm
  modified_base 12: mod_base = um
  modified_base 13: mod_base = um
  modified_base 14: mod_base = OTHER; note = 2'-fluoroguanosine
  modified_base 15: mod_base = OTHER; note = 2'-O-methyladenosine
  modified_base 16: mod_base = OTHER; note = 2'-fluorocytidine
  modified_base 17: mod_base = OTHER; note = 2'-O-methyladenosine
  modified_base 18: mod_base = OTHER; note = 2'-O-methyladenosine
  modified_base 19: mod_base = cm
  modified_base 20: mod_base = OTHER; note = 2'-O-methyladenosine
  modified_base 21: mod_base = OTHER; note = 2'-O-methyluridine with a 3'-phosphorothioate linkage
  modified_base 22: mod_base = OTHER; note = 2'-O-methyluridine with a 3'-phosphorothioate linkage
  modified_base 23: mod_base = gm
tcgaaaaagtcttgacaacattg

SEQ ID NO: 2033 - RNA, 23 nt, synthetic construct
  source 1..23: mol_type = other RNA
  modified_base 1: mod_base = OTHER; note = 2'-O-methyluridine with a 3'-phosphorothioate linkage
  modified_base 2: mod_base = OTHER; note = 2'-fluoroguanosine with a 3'-phosphorothioate linkage
  modified_base 3: mod_base = um
  modified_base 4: mod_base = um
  modified_base 5: mod_base = OTHER; note = 2'-fluorocytidine
  modified_base 6: mod_base = OTHER; note = 2'-O-methyladenosine
  modified_base 7: mod_base = OTHER; note = 2'-fluorouridine
  modified_base 8: mod_base = gm
  modified_base 9: mod_base = gm
  modified_base 10: mod_base = OTHER; note = 2'-O-methyladenosine
  modified_base 11: mod_base = cm
  modified_base 12: mod_base = OTHER; note = 2'-O-methyladenosine
  modified_base 13: mod_base = um
  modified_base 14: mod_base = OTHER; note = 2'-fluorocytidine
  modified_base 15: mod_base = OTHER; note = 2'-O-methyladenosine
  modified_base 16: mod_base = OTHER; note = 2'-fluorouridine
  modified_base 17: mod_base = gm
  modified_base 18: mod_base = cm
  modified_base 19: mod_base = OTHER; note = 2'-O-methyladenosine
  modified_base 20: mod_base = gm
  modified_base 21: mod_base = OTHER; note = 2'-O-methyladenosine with a 3'-phosphorothioate linkage
  modified_base 22: mod_base = OTHER; note = 2'-O-methyluridine with a 3'-phosphorothioate linkage
  modified_base 23: mod_base = gm
tgttcatggacatcatgcagatg

SEQ ID NO: 2034 - RNA, 23 nt, synthetic construct
  source 1..23: mol_type = other RNA
  modified_base 1: mod_base = OTHER; note = 2'-O-methyluridine with a 3'-phosphorothioate linkage
  modified_base 2: mod_base = OTHER; note = 2'-fluorouridine with a 3'-phosphorothioate linkage
  modified_base 3: mod_base = gm
  modified_base 4: mod_base = um
  modified_base 5: mod_base = OTHER; note = 2'-fluorouridine
  modified_base 6: mod_base = cm
  modified_base 7: mod_base = OTHER; note = 2'-fluoroadenosine
  modified_base 8: mod_base = um
  modified_base 9: mod_base = gm
  modified_base 10: mod_base = gm
  modified_base 11: mod_base = OTHER; note = 2'-O-methyladenosine
  modified_base 12: mod_base = cm
  modified_base 13: mod_base = OTHER; note = 2'-O-methyladenosine
  modified_base 14: mod_base = OTHER; note = 2'-fluorouridine
  modified_base 15: mod_base = cm
  modified_base 16: mod_base = OTHER; note = 2'-fluoroadenosine
  modified_base 17: mod_base = um
  modified_base 18: mod_base = gm
  modified_base 19: mod_base = cm
  modified_base 20: mod_base = OTHER; note = 2'-O-methyladenosine
  modified_base 21: mod_base = OTHER; note = 2'-O-methylguanosine with a 3'-phosphorothioate linkage
  modified_base 22: mod_base = OTHER; note = 2'-O-methyladenosine with a 3'-phosphorothioate linkage
  modified_base 23: mod_base = um
ttgttcatggacatcatgcagat

SEQ ID NO: 2035 - RNA, 23 nt, synthetic construct
  source 1..23: mol_type = other RNA
  modified_base 1: mod_base = OTHER; note = 2'-O-methyluridine with a 3'-phosphorothioate linkage
  modified_base 2: mod_base = OTHER; note = 2'-fluoroadenosine with a 3'-phosphorothioate linkage
  modified_base 3: mod_base = OTHER; note = 2'-O-methyladenosine
  modified_base 4: mod_base = um
  modified_base 5: mod_base = OTHER; note = 2'-fluorouridine
  modified_base 6: mod_base = cm
  modified_base 7: mod_base = OTHER; note = 2'-fluorocytidine
  modified_base 8: mod_base = OTHER; note = 2'-O-methyladenosine
  modified_base 9: mod_base = OTHER; note = 2'-O-methyladenosine
  modified_base 10: mod_base = cm
  modified_base 11: mod_base = cm
  modified_base 12: mod_base = OTHER; note = 2'-O-methyladenosine
  modified_base 13: mod_base = cm
  modified_base 14: mod_base = OTHER; note = 2'-fluoroadenosine
  modified_base 15: mod_base = gm
  modified_base 16: mod_base = OTHER; note = 2'-fluoroadenosine
  modified_base 17: mod_base = um
  modified_base 18: mod_base = cm
  modified_base 19: mod_base = um
  modified_base 20: mod_base = um
  modified_base 21: mod_base = OTHER; note = 2'-O-methyladenosine with a 3'-phosphorothioate linkage
  modified_base 22: mod_base = OTHER; note = 2'-O-methyluridine with a 3'-phosphorothioate linkage
  modified_base 23: mod_base = um
taattccaaccacagatcttatt

SEQ ID NO: 2036 - RNA, 23 nt, synthetic construct
  source 1..23: mol_type = other RNA
  modified_base 1: mod_base = OTHER; note = 2'-O-methyluridine with a 3'-phosphorothioate linkage
  modified_base 2: mod_base = OTHER; note = 2'-fluorouridine with a 3'-phosphorothioate linkage
  modified_base 3: mod_base = OTHER; note = 2'-O-methyladenosine
  modified_base 4: mod_base = OTHER; note = 2'-O-methyladenosine
  modified_base 5: mod_base = OTHER; note = 2'-fluorouridine
  modified_base 6: mod_base = um
  modified_base 7: mod_base = OTHER; note = 2'-fluorocytidine
  modified_base 8: mod_base = cm
  modified_base 9: mod_base = OTHER; note = 2'-O-methyladenosine
  modified_base 10: mod_base = OTHER; note = 2'-O-methyladenosine
  modified_base 11: mod_base = cm
  modified_base 12: mod_base = cm
  modified_base 13: mod_base = OTHER; note = 2'-O-methyladenosine
  modified_base 14: mod_base = OTHER; note = 2'-fluorocytidine
  modified_base 15: mod_base = OTHER; note = 2'-O-methyladenosine
  modified_base 16: mod_base = OTHER; note = 2'-fluoroguanosine
  modified_base 17: mod_base = OTHER; note = 2'-O-methyladenosine
  modified_base 18: mod_base = um
  modified_base 19: mod_base = cm
  modified_base 20: mod_base = um
  modified_base 21: mod_base = OTHER; note = 2'-O-methyluridine with a 3'-phosphorothioate linkage
  modified_base 22: mod_base = OTHER; note = 2'-O-methyladenosine with a 3'-phosphorothioate linkage
  modified_base 23: mod_base = um
ttaattccaaccacagatcttat

SEQ ID NO: 2037 - RNA, 23 nt, synthetic construct
  source 1..23: mol_type = other RNA
  modified_base 1: mod_base = OTHER; note = 2'-O-methyluridine with a 3'-phosphorothioate linkage
  modified_base 2: mod_base = OTHER; note = 2'-fluoroadenosine with a 3'-phosphorothioate linkage
  modified_base 3: mod_base = um
  modified_base 4: mod_base = OTHER; note = 2'-O-methyladenosine
  modified_base 5: mod_base = OTHER; note = 2'-fluoroadenosine
  modified_base 6: mod_base = um
  modified_base 7: mod_base = OTHER; note = 2'-fluorouridine
  modified_base 8: mod_base = cm
  modified_base 9: mod_base = cm
  modified_base 10: mod_base = OTHER; note = 2'-O-methyladenosine
  modified_base 11: mod_base = OTHER; note = 2'-O-methyladenosine
  modified_base 12: mod_base = cm
  modified_base 13: mod_base = cm
  modified_base 14: mod_base = OTHER; note = 2'-fluoroadenosine
  modified_base 15: mod_base = cm
  modified_base 16: mod_base = OTHER; note = 2'-fluoroadenosine
  modified_base 17: mod_base = gm
  modified_base 18: mod_base = OTHER; note = 2'-O-methyladenosine
  modified_base 19: mod_base = um
  modified_base 20: mod_base = cm
  modified_base 21: mod_base = OTHER; note = 2'-O-methyluridine with a 3'-phosphorothioate linkage
  modified_base 22: mod_base = OTHER; note = 2'-O-methyluridine with a 3'-phosphorothioate linkage
  modified_base 23: mod_base = OTHER; note = 2'-O-methyladenosine
tataattccaaccacagatctta

SEQ ID NO: 2038 - RNA, 23 nt, synthetic construct
  source 1..23: mol_type = other RNA
  modified_base 1: mod_base = OTHER; note = 2'-O-methyluridine with a 3'-phosphorothioate linkage
  modified_base 2: mod_base = OTHER; note = 2'-fluoroguanosine with a 3'-phosphorothioate linkage
  modified_base 3: mod_base = OTHER; note = 2'-O-methyladenosine
  modified_base 4: mod_base = OTHER; note = 2'-O-methyladenosine
  modified_base 5: mod_base = OTHER; note = 2'-fluorocytidine
  modified_base 6: mod_base = um
  modified_base 7: mod_base = OTHER; note = 2'-fluoroguanosine
  modified_base 8: mod_base = gm
  modified_base 9: mod_base = OTHER; note = 2'-O-methyladenosine
  modified_base 10: mod_base = OTHER; note = 2'-O-methyladenosine
  modified_base 11: mod_base = gm
  modified_base 12: mod_base = um
  modified_base 13: mod_base = OTHER; note = 2'-O-methyladenosine
  modified_base 14: mod_base = OTHER; note = 2'-fluoroadenosine
  modified_base 15: mod_base = OTHER; note = 2'-O-methyladenosine
  modified_base 16: mod_base = OTHER; note = 2'-fluorouridine
  modified_base 17: mod_base = OTHER; note = 2'-O-methyladenosine
  modified_base 18: mod_base = um
  modified_base 19: mod_base = OTHER; note = 2'-O-methyladenosine
  modified_base 20: mod_base = cm
  modified_base 21: mod_base = OTHER; note = 2'-O-methyladenosine with a 3'-phosphorothioate linkage
  modified_base 22: mod_base = OTHER; note = 2'-O-methylguanosine with a 3'-phosphorothioate linkage
  modified_base 23: mod_base = gm
tgaactggaagtaaatatacagg

SEQ ID NO: 2039 - RNA, 23 nt, synthetic construct
  source 1..23: mol_type = other RNA
  modified_base 1: mod_base = OTHER; note = 2'-O-methyluridine with a 3'-phosphorothioate linkage
  modified_base 2: mod_base = OTHER; note = 2'-fluoroguanosine with a 3'-phosphorothioate linkage
  modified_base 3: mod_base = gm
  modified_base 4: mod_base = OTHER; note = 2'-O-methyladenosine
  modified_base 5: mod_base = OTHER; note = 2'-fluoroadenosine
  modified_base 6: mod_base = cm
  modified_base 7: mod_base = OTHER; note = 2'-fluorouridine
  modified_base 8: mod_base = gm
  modified_base 9: mod_base = gm
  modified_base 10: mod_base = OTHER; note = 2'-O-methyladenosine
  modified_base 11: mod_base = OTHER; note = 2'-O-methyladenosine
  modified_base 12: mod_base = gm
  modified_base 13: mod_base = um
  modified_base 14: mod_base = OTHER; note = 2'-fluoroadenosine
  modified_base 15: mod_base = OTHER; note = 2'-O-methyladenosine
  modified_base 16: mod_base = OTHER; note = 2'-fluoroadenosine
  modified_base 17: mod_base = um
  modified_base 18: mod_base = OTHER; note = 2'-O-methyladenosine
  modified_base 19: mod_base = um
  modified_base 20: mod_base = OTHER; note = 2'-O-methyladenosine
  modified_base 21: mod_base = OTHER; note = 2'-O-methylcytidine with a 3'-phosphorothioate linkage
  modified_base 22: mod_base = OTHER; note = 2'-O-methyladenosine with a 3'-phosphorothioate linkage
  modified_base 23: mod_base = gm
tggaactggaagtaaatatacag

SEQ ID NO: 2040 - RNA, 23 nt, synthetic construct
  source 1..23: mol_type = other RNA
  modified_base 1: mod_base = OTHER; note = 2'-O-methyluridine with a 3'-phosphorothioate linkage
  modified_base 2: mod_base = OTHER; note = 2'-fluorouridine with a 3'-phosphorothioate linkage
  modified_base 3: mod_base = gm
  modified_base 4: mod_base = gm
  modified_base 5: mod_base = OTHER; note = 2'-fluoroadenosine
  modified_base 6: mod_base = OTHER; note = 2'-O-methyladenosine
  modified_base 7: mod_base = OTHER; note = 2'-fluorocytidine
  modified_base 8: mod_base = um
  modified_base 9: mod_base = gm
  modified_base 10: mod_base = gm
  modified_base 11: mod_base = OTHER; note = 2'-O-methyladenosine
  modified_base 12: mod_base = OTHER; note = 2'-O-methyladenosine
  modified_base 13: mod_base = gm
  modified_base 14: mod_base = OTHER; note = 2'-fluorouridine
  modified_base 15: mod_base = OTHER; note = 2'-O-methyladenosine
  modified_base 16: mod_base = OTHER; note = 2'-fluoroadenosine
  modified_base 17: mod_base = OTHER; note = 2'-O-methyladenosine
  modified_base 18: mod_base = um
  modified_base 19: mod_base = OTHER; note = 2'-O-methyladenosine
  modified_base 20: mod_base = um
  modified_base 21: mod_base = OTHER; note = 2'-O-methyladenosine with a 3'-phosphorothioate linkage
  modified_base 22: mod_base = OTHER; note = 2'-O-methylcytidine with a 3'-phosphorothioate linkage
  modified_base 23: mod_base = OTHER; note = 2'-O-methyladenosine
ttggaactggaagtaaatataca

SEQ ID NO: 2041 - RNA, 23 nt, synthetic construct
  source 1..23: mol_type = other RNA
  modified_base 1: mod_base = OTHER; note = 2'-O-methyluridine with a 3'-phosphorothioate linkage
  modified_base 2: mod_base = OTHER; note = 2'-fluoroadenosine with a 3'-phosphorothioate linkage
  modified_base 3: mod_base = um
  modified_base 4: mod_base = um
  modified_base 5: mod_base = OTHER; note = 2'-fluorocytidine
  modified_base 6: mod_base = um
  modified_base 7: mod_base = OTHER; note = 2'-fluoroguanosine
  modified_base 8: mod_base = gm
  modified_base 9: mod_base = OTHER; note = 2'-O-methyladenosine
  modified_base 10: mod_base = OTHER; note = 2'-O-methyladenosine
  modified_base 11: mod_base = cm
  modified_base 12: mod_base = um
  modified_base 13: mod_base = gm
  modified_base 14: mod_base = OTHER; note = 2'-fluoroguanosine
  modified_base 15: mod_base = OTHER; note = 2'-O-methyladenosine
  modified_base 16: mod_base = OTHER; note = 2'-fluoroadenosine
  modified_base 17: mod_base = gm
  modified_base 18: mod_base = um
  modified_base 19: mod_base = OTHER; note = 2'-O-methyladenosine
  modified_base 20: mod_base = OTHER; note = 2'-O-methyladenosine
  modified_base 21: mod_base = OTHER; note = 2'-O-methyladenosine with a 3'-phosphorothioate linkage
  modified_base 22: mod_base = OTHER; note = 2'-O-methyluridine with a 3'-phosphorothioate linkage
  modified_base 23: mod_base = OTHER; note = 2'-O-methyladenosine
tattctggaactggaagtaaata

SEQ ID NO: 2042 - RNA, 23 nt, synthetic construct
  source 1..23: mol_type = other RNA
  modified_base 1: mod_base = OTHER; note = 2'-O-methyluridine with a 3'-phosphorothioate linkage
  modified_base 2: mod_base = OTHER; note = 2'-fluoroguanosine with a 3'-phosphorothioate linkage
  modified_base 3: mod_base = gm
  modified_base 4: mod_base = cm
  modified_base 5: mod_base = OTHER; note = 2'-fluorocytidine
  modified_base 6: mod_base = OTHER; note = 2'-O-methyladenosine
  modified_base 7: mod_base = OTHER; note = 2'-fluoroguanosine
  modified_base 8: mod_base = cm
  modified_base 9: mod_base = OTHER; note = 2'-O-methyladenosine
  modified_base 10: mod_base = OTHER; note = 2'-O-methyladenosine
  modified_base 11: mod_base = um
  modified_base 12: mod_base = OTHER; note = 2'-O-methyladenosine
  modified_base 13: mod_base = cm
  modified_base 14: mod_base = OTHER; note = 2'-fluorocytidine
  modified_base 15: mod_base = cm
  modified_base 16: mod_base = OTHER; note = 2'-fluoroadenosine
  modified_base 17: mod_base = OTHER; note = 2'-O-methyladenosine
  modified_base 18: mod_base = OTHER; note = 2'-O-methyladenosine
  modified_base 19: mod_base = OTHER; note = 2'-O-methyladenosine
  modified_base 20: mod_base = um
  modified_base 21: mod_base = OTHER; note = 2'-O-methyladenosine with a 3'-phosphorothioate linkage
  modified_base 22: mod_base = OTHER; note = 2'-O-methyluridine with a 3'-phosphorothioate linkage
  modified_base 23: mod_base = OTHER; note = 2'-O-methyladenosine
tggccagcaatacccaaaatata

SEQ ID NO: 2043 - RNA, 23 nt, synthetic construct
  source 1..23: mol_type = other RNA
  modified_base 1: mod_base = OTHER; note = 2'-O-methyluridine with a 3'-phosphorothioate linkage
  modified_base 2: mod_base = OTHER; note = 2'-fluoroadenosine with a 3'-phosphorothioate linkage
  modified_base 3: mod_base = OTHER; note = 2'-O-methyladenosine
  modified_base 4: mod_base = um
  modified_base 5: mod_base = OTHER; note = 2'-fluoroguanosine
  modified_base 6: mod_base = OTHER; note = 2'-O-methyladenosine
  modified_base 7: mod_base = OTHER; note = 2'-fluorocytidine
  modified_base 8: mod_base = OTHER; note = 2'-O-methyladenosine
  modified_base 9: mod_base = OTHER; note = 2'-O-methyladenosine
  modified_base 10: mod_base = cm
  modified_base 11: mod_base = um
  modified_base 12: mod_base = gm
  modified_base 13: mod_base = um
  modified_base 14: mod_base = OTHER; note = 2'-fluoroadenosine
  modified_base 15: mod_base = cm
  modified_base 16: mod_base = OTHER; note = 2'-fluorouridine
  modified_base 17: mod_base = gm
  modified_base 18: mod_base = OTHER; note = 2'-O-methyladenosine
  modified_base 19: mod_base = OTHER; note = 2'-O-methyladenosine
  modified_base 20: mod_base = um
  modified_base 21: mod_base = OTHER; note = 2'-O-methyladenosine with a 3'-phosphorothioate linkage
  modified_base 22: mod_base = OTHER; note = 2'-O-methylcytidine with a 3'-phosphorothioate linkage
  modified_base 23: mod_base = OTHER; note = 2'-O-methyladenosine
taatgacaactgtactgaataca

SEQ ID NO: 2044 - RNA, 23 nt, synthetic construct
  source 1..23: mol_type = other RNA
  modified_base 1: mod_base = OTHER; note = 2'-O-methyluridine with a 3'-phosphorothioate linkage
  modified_base 2: mod_base = OTHER; note = 2'-fluoroguanosine with a 3'-phosphorothioate linkage
  modified_base 3: mod_base = OTHER; note = 2'-O-methyladenosine
  modified_base 4: mod_base = OTHER; note = 2'-O-methyladenosine
  modified_base 5: mod_base = OTHER; note = 2'-fluorouridine
  modified_base 6: mod_base = gm
  modified_base 7: mod_base = OTHER; note = 2'-fluoroadenosine
  modified_base 8: mod_base = cm
  modified_base 9: mod_base = OTHER; note = 2'-O-methyladenosine
  modified_base 10: mod_base = OTHER; note = 2'-O-methyladenosine
  modified_base 11: mod_base = cm
  modified_base 12: mod_base = um
  modified_base 13: mod_base = gm
  modified_base 14: mod_base = OTHER; note = 2'-fluorouridine
  modified_base 15: mod_base = OTHER; note = 2'-O-methyladenosine
  modified_base 16: mod_base = OTHER; note = 2'-fluorocytidine
  modified_base 17: mod_base = um
  modified_base 18: mod_base = gm
  modified_base 19: mod_base = OTHER; note = 2'-O-methyladenosine
  modified_base 20: mod_base = OTHER; note = 2'-O-methyladenosine
  modified_base 21: mod_base = OTHER; note = 2'-O-methyluridine with a 3'-phosphorothioate linkage
  modified_base 22: mod_base = OTHER; note = 2'-O-methyladenosine with a 3'-phosphorothioate linkage
  modified_base 23: mod_base = cm
tgaatgacaactgtactgaatac

SEQ ID NO: 2045 - RNA, 23 nt, synthetic construct
  source 1..23: mol_type = other RNA
  modified_base 1: mod_base = OTHER; note = 2'-O-methyluridine with a 3'-phosphorothioate linkage
  modified_base 2: mod_base = OTHER; note = 2'-fluoroadenosine with a 3'-phosphorothioate linkage
  modified_base 3: mod_base = gm
  modified_base 4: mod_base = cm
  modified_base 5: mod_base = OTHER; note = 2'-fluorocytidine
  modified_base 6: mod_base = um
  modified_base 7: mod_base = OTHER; note = 2'-fluoroguanosine
  modified_base 8: mod_base = um
  modified_base 9: mod_base = cm
  modified_base 10: mod_base = OTHER; note = 2'-O-methyladenosine
  modified_base 11: mod_base = OTHER; note = 2'-O-methyladenosine
  modified_base 12: mod_base = um
  modified_base 13: mod_base = um
  modified_base 14: mod_base = OTHER; note = 2'-fluorocytidine
  modified_base 15: mod_base = um
  modified_base 16: mod_base = OTHER; note = 2'-fluorouridine
  modified_base 17: mod_base = um
  modified_base 18: mod_base = gm
  modified_base 19: mod_base = um
  modified_base 20: mod_base = cm
  modified_base 21: mod_base = OTHER; note = 2'-O-methyluridine with a 3'-phosphorothioate linkage
  modified_base 22: mod_base = OTHER; note = 2'-O-methyladenosine with a 3'-phosphorothioate linkage
  modified_base 23: mod_base = OTHER; note = 2'-O-methyladenosine
tagcctgtcaattctttgtctaa

SEQ ID NO: 2046 - RNA, 23 nt, synthetic construct
  source 1..23: mol_type = other RNA
  modified_base 1: mod_base = OTHER; note = 2'-O-methyluridine with a 3'-phosphorothioate linkage
  modified_base 2: mod_base = OTHER; note = 2'-fluoroadenosine with a 3'-phosphorothioate linkage
  modified_base 3: mod_base = OTHER; note = 2'-O-methyladenosine
  modified_base 4: mod_base = gm
  modified_base 5: mod_base = OTHER; note = 2'-fluorocytidine
  modified_base 6: mod_base = cm
  modified_base 7: mod_base = OTHER; note = 2'-fluorouridine
  modified_base 8: mod_base = gm
  modified_base 9: mod_base = um
  modified_base 10: mod_base = cm
  modified_base 11: mod_base = OTHER; note = 2'-O-methyladenosine
  modified_base 12: mod_base = OTHER; note = 2'-O-methyladenosine
  modified_base 13: mod_base = um
  modified_base 14: mod_base = OTHER; note = 2'-fluorouridine
  modified_base 15: mod_base = cm
  modified_base 16: mod_base = OTHER; note = 2'-fluorouridine
  modified_base 17: mod_base = um
  modified_base 18: mod_base = um
  modified_base 19: mod_base = gm
  modified_base 20: mod_base = um
  modified_base 21: mod_base = OTHER; note = 2'-O-methylcytidine with a 3'-phosphorothioate linkage
  modified_base 22: mod_base = OTHER; note = 2'-O-methyluridine with a 3'-phosphorothioate linkage
  modified_base 23: mod_base = OTHER; note = 2'-O-methyladenosine
taagcctgtcaattctttgtcta

SEQ ID NO: 2047 - RNA, 23 nt, synthetic construct
  source 1..23: mol_type = other RNA
  modified_base 1: mod_base = OTHER; note = 2'-O-methyluridine with a 3'-phosphorothioate linkage
  modified_base 2: mod_base = OTHER; note = 2'-fluoroguanosine with a 3'-phosphorothioate linkage
  modified_base 3: mod_base = gm
  modified_base 4: mod_base = gm
  modified_base 5: mod_base = OTHER; note = 2'-fluorocytidine
  modified_base 6: mod_base = OTHER; note = 2'-O-methyladenosine
  modified_base 7: mod_base = OTHER; note = 2'-fluoroadenosine
  modified_base 8: mod_base = OTHER; note = 2'-O-methyladenosine
  modified_base 9: mod_base = gm
  modified_base 10: mod_base = cm
  modified_base 11: mod_base = um
  modified_base 12: mod_base = um
  modified_base 13: mod_base = cm
  modified_base 14: mod_base = OTHER; note = 2'-fluoroadenosine
  modified_base 15: mod_base = um
  modified_base 16: mod_base = OTHER; note = 2'-fluorouridine
  modified_base 17: mod_base = cm
  modified_base 18: mod_base = OTHER; note = 2'-O-methyladenosine
  modified_base 19: mod_base = OTHER; note = 2'-O-methyladenosine
  modified_base 20: mod_base = gm
  modified_base 21: mod_base = OTHER; note = 2'-O-methylcytidine with a 3'-phosphorothioate linkage
  modified_base 22: mod_base = OTHER; note = 2'-O-methylcytidine with a 3'-phosphorothioate linkage
  modified_base 23: mod_base = um
tgggcaaagcttcattcaagcct

SEQ ID NO: 2048 - RNA, 23 nt, synthetic construct
  source 1..23: mol_type = other RNA
  modified_base 1: mod_base = OTHER; note = 2'-O-methyluridine with a 3'-phosphorothioate linkage
  modified_base 2: mod_base = OTHER; note = 2'-fluoroadenosine with a 3'-phosphorothioate linkage
  modified_base 3: mod_base = gm
  modified_base 4: mod_base = gm
  modified_base 5: mod_base = OTHER; note = 2'-fluoroguanosine
  modified_base 6: mod_base = cm
  modified_base 7: mod_base = OTHER; note = 2'-fluoroadenosine
  modified_base 8: mod_base = OTHER; note = 2'-O-methyladenosine
  modified_base 9: mod_base = OTHER; note = 2'-O-methyladenosine
  modified_base 10: mod_base = gm
  modified_base 11: mod_base = cm
  modified_base 12: mod_base = um
  modified_base 13: mod_base = um
  modified_base 14: mod_base = OTHER; note = 2'-fluorocytidine
  modified_base 15: mod_base = OTHER; note = 2'-O-methyladenosine
  modified_base 16: mod_base = OTHER; note = 2'-fluorouridine
  modified_base 17: mod_base = um
  modified_base 18: mod_base = cm
  modified_base 19: mod_base = OTHER; note = 2'-O-methyladenosine
  modified_base 20: mod_base = OTHER; note = 2'-O-methyladenosine
  modified_base 21: mod_base = OTHER; note = 2'-O-methylguanosine with a 3'-phosphorothioate linkage
  modified_base 22: mod_base = OTHER; note = 2'-O-methylcytidine with a 3'-phosphorothioate linkage
  modified_base 23: mod_base = cm
tagggcaaagcttcattcaagcc

SEQ ID NO: 2049 - RNA, 23 nt, synthetic construct
  source 1..23: mol_type = other RNA
  modified_base 1: mod_base = OTHER; note = 2'-O-methyluridine with a 3'-phosphorothioate linkage
  modified_base 2: mod_base = OTHER; note = 2'-fluoroadenosine with a 3'-phosphorothioate linkage
  modified_base 3: mod_base = OTHER; note = 2'-O-methyladenosine
  modified_base 4: mod_base = gm
  modified_base 5: mod_base = OTHER; note = 2'-fluoroguanosine
  modified_base 6: mod_base = gm
  modified_base 7: mod_base = OTHER; note = 2'-fluorocytidine
  modified_base 8: mod_base = OTHER; note = 2'-O-methyladenosine
  modified_base 9: mod_base = OTHER; note = 2'-O-methyladenosine
  modified_base 10: mod_base = OTHER; note = 2'-O-methyladenosine
  modified_base 11: mod_base = gm
  modified_base 12: mod_base = cm
  modified_base 13: mod_base = um
  modified_base 14: mod_base = OTHER; note = 2'-fluorouridine
  modified_base 15: mod_base = cm
  modified_base 16: mod_base = OTHER; note = 2'-fluoroadenosine
  modified_base 17: mod_base = um
  modified_base 18: mod_base = um
  modified_base 19: mod_base = cm
  modified_base 20: mod_base = OTHER; note = 2'-O-methyladenosine
  modified_base 21: mod_base = OTHER; note = 2'-O-methyladenosine with a 3'-phosphorothioate linkage
  modified_base 22: mod_base = OTHER; note = 2'-O-methylguanosine with a 3'-phosphorothioate linkage
  modified_base 23: mod_base = cm
taagggcaaagcttcattcaagc

SEQ ID NO: 2050 - RNA, 23 nt, synthetic construct
  source 1..23: mol_type = other RNA
  modified_base 1: mod_base = OTHER; note = 2'-O-methyluridine with a 3'-phosphorothioate linkage
  modified_base 2: mod_base = OTHER; note = 2'-fluoroguanosine with a 3'-phosphorothioate linkage
  modified_base 3: mod_base = OTHER; note = 2'-O-methyladenosine
  modified_base 4: mod_base = OTHER; note = 2'-O-methyladenosine
  modified_base 5: mod_base = OTHER; note = 2'-fluoroadenosine
  modified_base 6: mod_base = OTHER; note = 2'-O-methyladenosine
  modified_base 7: mod_base = OTHER; note = 2'-fluoroadenosine
  modified_base 8: mod_base = gm
  modified_base 9: mod_base = gm
  modified_base 10: mod_base = gm
  modified_base 11: mod_base = cm
  modified_base 12: mod_base = OTHER; note = 2'-O-methyladenosine
  modified_base 13: mod_base = OTHER; note = 2'-O-methyladenosine
  modified_base 14: mod_base = OTHER; note = 2'-fluoroadenosine
  modified_base 15: mod_base = gm
  modified_base 16: mod_base = OTHER; note = 2'-fluorocytidine
  modified_base 17: mod_base = um
  modified_base 18: mod_base = um
  modified_base 19: mod_base = cm
  modified_base 20: mod_base = OTHER; note = 2'-O-methyladenosine
  modified_base 21: mod_base = OTHER; note = 2'-O-methyluridine with a 3'-phosphorothioate linkage
  modified_base 22: mod_base = OTHER; note = 2'-O-methyluridine with a 3'-phosphorothioate linkage
  modified_base 23: mod_base = cm
tgaaaaagggcaaagcttcattc

SEQ ID NO: 2051 - RNA, 23 nt, synthetic construct
  source 1..23: mol_type = other RNA
  modified_base 1: mod_base = OTHER; note = 2'-O-methyluridine with a 3'-phosphorothioate linkage
  modified_base 2: mod_base = OTHER; note = 2'-fluoroguanosine with a 3'-phosphorothioate linkage
  modified_base 3: mod_base = gm
  modified_base 4: mod_base = OTHER; note = 2'-O-methyladenosine
  modified_base 5: mod_base = OTHER; note = 2'-fluoroadenosine
  modified_base 6: mod_base = cm
  modified_base 7: mod_base = OTHER; note = 2'-fluorouridine
  modified_base 8: mod_base = gm
  modified_base 9: mod_base = OTHER; note = 2'-O-methyladenosine
  modified_base 10: mod_base = gm
  modified_base 11: mod_base = gm
  modified_base 12: mod_base = gm
  modified_base 13: mod_base = cm
  modified_base 14: mod_base = OTHER; note = 2'-fluoroadenosine
  modified_base 15: mod_base = OTHER; note = 2'-O-methyladenosine
  modified_base 16: mod_base = OTHER; note = 2'-fluoroadenosine
  modified_base 17: mod_base = cm
  modified_base 18: mod_base = um
  modified_base 19: mod_base = um
  modified_base 20: mod_base = um
  modified_base 21: mod_base = OTHER; note = 2'-O-methylguanosine with a 3'-phosphorothioate linkage
  modified_base 22: mod_base = OTHER; note = 2'-O-methylcytidine with a 3'-phosphorothioate linkage
  modified_base 23: mod_base = um
tggaactgagggcaaactttgct

SEQ ID NO: 2052 - RNA, 23 nt, synthetic construct
  source 1..23: mol_type = other RNA
  modified_base 1: mod_base = OTHER; note = 2'-O-methyluridine with a 3'-phosphorothioate linkage
  modified_base 2: mod_base = OTHER; note = 2'-fluorouridine with a 3'-phosphorothioate linkage
  modified_base 3: mod_base = um
  modified_base 4: mod_base = gm
  modified_base 5: mod_base = OTHER; note = 2'-fluoroguanosine
  modified_base 6: mod_base = OTHER; note = 2'-O-methyladenosine
  modified_base 7: mod_base = OTHER; note = 2'-fluoroadenosine
  modified_base 8: mod_base = cm
  modified_base 9: mod_base = um
  modified_base 10: mod_base = gm
  modified_base 11: mod_base = OTHER; note = 2'-O-methyladenosine
  modified_base 12: mod_base = gm
  modified_base 13: mod_base = gm
  modified_base 14: mod_base = OTHER; note = 2'-fluoroguanosine
  modified_base 15: mod_base = cm
  modified_base 16: mod_base = OTHER; note = 2'-fluoroadenosine
  modified_base 17: mod_base = OTHER; note = 2'-O-methyladenosine
  modified_base 18: mod_base = OTHER; note = 2'-O-methyladenosine
  modified_base 19: mod_base = cm
  modified_base 20: mod_base = um
  modified_base 21: mod_base = OTHER; note = 2'-O-methyluridine with a 3'-phosphorothioate linkage
  modified_base 22: mod_base = OTHER; note = 2'-O-methyluridine with a 3'-phosphorothioate linkage
  modified_base 23: mod_base = gm
tttggaactgagggcaaactttg

SEQ ID NO: 2053 - RNA, 23 nt, synthetic construct
  source 1..23: mol_type = other RNA
  modified_base 1: mod_base = OTHER; note = 2'-O-methyluridine with a 3'-phosphorothioate linkage
  modified_base 2: mod_base = OTHER; note = 2'-fluorouridine with a 3'-phosphorothioate linkage
  modified_base 3: mod_base = um
  modified_base 4: mod_base = OTHER; note = 2'-O-methyladenosine
  modified_base 5: mod_base = OTHER; note = 2'-fluorocytidine
  modified_base 6: mod_base = um
  modified_base 7: mod_base = OTHER; note = 2'-fluorouridine
  modified_base 8: mod_base = cm
  modified_base 9: mod_base = OTHER; note = 2'-O-methyladenosine
  modified_base 10: mod_base = um
  modified_base 11: mod_base = cm
  modified_base 12: mod_base = cm
  modified_base 13: mod_base = um
  modified_base 14: mod_base = OTHER; note = 2'-fluoroguanosine
  modified_base 15: mod_base = um
  modified_base 16: mod_base = OTHER; note = 2'-fluoroguanosine
  modified_base 17: mod_base = OTHER; note = 2'-O-methyladenosine
  modified_base 18: mod_base = gm
  modified_base 19: mod_base = um
  modified_base 20: mod_base = um
  modified_base 21: mod_base = OTHER; note = 2'-O-methylguanosine with a 3'-phosphorothioate linkage
  modified_base 22: mod_base = OTHER; note = 2'-O-methylguanosine with a 3'-phosphorothioate linkage
  modified_base 23: mod_base = OTHER; note = 2'-O-methyladenosine
tttacttcatcctgtgagttgga

SEQ ID NO: 2054 - RNA, 23 nt, synthetic construct
  source 1..23: mol_type = other RNA
  modified_base 1: mod_base = OTHER; note = 2'-O-methyluridine with a 3'-phosphorothioate linkage
  modified_base 2: mod_base = OTHER; note = 2'-fluorocytidine with a 3'-phosphorothioate linkage
  modified_base 3: mod_base = um
  modified_base 4: mod_base = um
  modified_base 5: mod_base = OTHER; note = 2'-fluoroadenosine
  modified_base 6: mod_base = cm
  modified_base 7: mod_base = OTHER; note = 2'-fluorouridine
  modified_base 8: mod_base = um
  modified_base 9: mod_base = cm
  modified_base 10: mod_base = OTHER; note = 2'-O-methyladenosine
  modified_base 11: mod_base = um
  modified_base 12: mod_base = cm
  modified_base 13: mod_base = cm
  modified_base 14: mod_base = OTHER; note = 2'-fluorouridine
  modified_base 15: mod_base = gm
  modified_base 16: mod_base = OTHER; note = 2'-fluorouridine
  modified_base 17: mod_base = gm
  modified_base 18: mod_base = OTHER; note = 2'-O-methyladenosine
  modified_base 19: mod_base = gm
  modified_base 20: mod_base = um
  modified_base 21: mod_base = OTHER; note = 2'-O-methyluridine with a 3'-phosphorothioate linkage
  modified_base 22: mod_base = OTHER; note = 2'-O-methylguanosine with a 3'-phosphorothioate linkage
  modified_base 23: mod_base = gm
tcttacttcatcctgtgagttgg

SEQ ID NO: 2055 - RNA, 23 nt, synthetic construct
  source 1..23: mol_type = other RNA
  modified_base 1: mod_base = OTHER; note = 2'-O-methyluridine with a 3'-phosphorothioate linkage
  modified_base 2: mod_base = OTHER; note = 2'-fluoroguanosine with a 3'-phosphorothioate linkage
  modified_base 3: mod_base = cm
  modified_base 4: mod_base = OTHER; note = 2'-O-methyladenosine
  modified_base 5: mod_base = OTHER; note = 2'-fluoroadenosine
  modified_base 6: mod_base = um
  modified_base 7: mod_base = OTHER; note = 2'-fluoroadenosine
  modified_base 8: mod_base = um
  modified_base 9: mod_base = um
  modified_base 10: mod_base = um
  modified_base 11: mod_base = um
  modified_base 12: mod_base = cm
  modified_base 13: mod_base = cm
  modified_base 14: mod_base = OTHER; note = 2'-fluorocytidine
  modified_base 15: mod_base = um
  modified_base 16: mod_base = OTHER; note = 2'-fluorouridine
  modified_base 17: mod_base = OTHER; note = 2'-O-methyladenosine
  modified_base 18: mod_base = cm
  modified_base 19: mod_base = um
  modified_base 20: mod_base = um
  modified_base 21: mod_base = OTHER; note = 2'-O-methylcytidine with a 3'-phosphorothioate linkage
  modified_base 22: mod_base = OTHER; note = 2'-O-methyladenosine with a 3'-phosphorothioate linkage
  modified_base 23: mod_base = um
tgcaatattttcccttacttcat

SEQ ID NO: 2056 - RNA, 23 nt, synthetic construct
  source 1..23: mol_type = other RNA
  modified_base 1: mod_base = OTHER; note = 2'-O-methyluridine with a 3'-phosphorothioate linkage
  modified_base 2: mod_base = OTHER; note = 2'-fluoroadenosine with a 3'-phosphorothioate linkage
  modified_base 3: mod_base = gm
  modified_base 4: mod_base = cm
  modified_base 5: mod_base = OTHER; note = 2'-fluoroadenosine
  modified_base 6: mod_base = OTHER; note = 2'-O-methyladenosine
  modified_base 7: mod_base = OTHER; note = 2'-fluorouridine
  modified_base 8: mod_base = OTHER; note = 2'-O-methyladenosine
  modified_base 9: mod_base = um
  modified_base 10: mod_base = um
  modified_base 11: mod_base = um
  modified_base 12: mod_base = um
  modified_base 13: mod_base = cm
  modified_base 14: mod_base = OTHER; note = 2'-fluorocytidine
  modified_base 15: mod_base = cm
  modified_base 16: mod_base = OTHER; note = 2'-fluorouridine
  modified_base 17: mod_base = um
  modified_base 18: mod_base = OTHER; note = 2'-O-methyladenosine
  modified_base 19: mod_base = cm
  modified_base 20: mod_base = um
  modified_base 21: mod_base = OTHER; note = 2'-O-methyluridine with a 3'-phosphorothioate linkage
  modified_base 22: mod_base = OTHER; note = 2'-O-methylcytidine with a 3'-phosphorothioate linkage
  modified_base 23: mod_base = OTHER; note = 2'-O-methyladenosine
tagcaatattttcccttacttca

SEQ ID NO: 2057 - RNA, 23 nt, synthetic construct
  source 1..23: mol_type = other RNA
  modified_base 1: mod_base = OTHER; note = 2'-O-methyluridine with a 3'-phosphorothioate linkage
  modified_base 2: mod_base = OTHER; note = 2'-fluorocytidine with a 3'-phosphorothioate linkage
  modified_base 3: mod_base = gm
  modified_base 4: mod_base = OTHER; note = 2'-O-methyladenosine
  modified_base 5: mod_base = OTHER; note = 2'-fluoroguanosine
  modified_base 6: mod_base = cm
  modified_base 7: mod_base = OTHER; note = 2'-fluoroadenosine
  modified_base 8: mod_base = OTHER; note = 2'-O-methyladenosine
  modified_base 9: mod_base = um
  modified_base 10: mod_base = OTHER; note = 2'-O-methyladenosine
  modified_base 11: mod_base = um
  modified_base 12: mod_base = um
  modified_base 13: mod_base = um
  modified_base 14: mod_base = OTHER; note = 2'-fluorouridine
  modified_base 15: mod_base = cm
  modified_base 16: mod_base = OTHER; note = 2'-fluorocytidine
  modified_base 17: mod_base = cm
  modified_base 18: mod_base = um
  modified_base 19: mod_base = um
  modified_base 20: mod_base = OTHER; note = 2'-O-methyladenosine
  modified_base 21: mod_base = OTHER; note = 2'-O-methylcytidine with a 3'-phosphorothioate linkage
  modified_base 22: mod_base = OTHER; note = 2'-O-methyluridine with a 3'-phosphorothioate linkage
  modified_base 23: mod_base = um
tcgagcaatattttcccttactt

SEQ ID NO: 2058 - RNA, 23 nt, synthetic construct
  source 1..23: mol_type = other RNA
  modified_base 1: mod_base = OTHER; note = 2'-O-methyluridine with a 3'-phosphorothioate linkage
  modified_base 2: mod_base = OTHER; note = 2'-fluorocytidine with a 3'-phosphorothioate linkage
  modified_base 3: mod_base = OTHER; note = 2'-O-methyladenosine
  modified_base 4: mod_base = cm
  modified_base 5: mod_base = OTHER; note = 2'-fluoroguanosine
  modified_base 6: mod_base = OTHER; note = 2'-O-methyladenosine
  modified_base 7: mod_base = OTHER; note = 2'-fluoroguanosine
  modified_base 8: mod_base = cm
  modified_base 9: mod_base = OTHER; note = 2'-O-methyladenosine
  modified_base 10: mod_base = OTHER; note = 2'-O-methyladenosine
  modified_base 11: mod_base = um
  modified_base 12: mod_base = OTHER; note = 2'-O-methyladenosine
  modified_base 13: mod_base = um
  modified_base 14: mod_base = OTHER; note = 2'-fluorouridine
  modified_base 15: mod_base = um
  modified_base 16: mod_base = OTHER; note = 2'-fluorouridine
  modified_base 17: mod_base = cm
  modified_base 18: mod_base = cm
  modified_base 19: mod_base = cm
  modified_base 20: mod_base = um
  modified_base 21: mod_base = OTHER; note = 2'-O-methyluridine with a 3'-phosphorothioate linkage
  modified_base 22: mod_base = OTHER; note = 2'-O-methyladenosine with a 3'-phosphorothioate linkage
  modified_base 23: mod_base = cm
tcacgagcaatattttcccttac

SEQ ID NO: 2059 - RNA, 23 nt, synthetic construct
  source 1..23: mol_type = other RNA
  modified_base 1: mod_base = OTHER; note = 2'-O-methyluridine with a 3'-phosphorothioate linkage
  modified_base 2: mod_base = OTHER; note = 2'-fluorocytidine with a 3'-phosphorothioate linkage
  modified_base 3: mod_base = cm
  modified_base 4: mod_base = OTHER; note = 2'-O-methyladenosine
  modified_base 5: mod_base = OTHER; note = 2'-fluorocytidine
  modified_base 6: mod_base = gm
  modified_base 7: mod_base = OTHER; note = 2'-fluoroadenosine
  modified_base 8: mod_base = gm
  modified_base 9: mod_base = cm
  modified_base 10: mod_base = OTHER; note = 2'-O-methyladenosine
  modified_base 11: mod_base = OTHER; note = 2'-O-methyladenosine
  modified_base 12: mod_base = um
  modified_base 13: mod_base = OTHER; note = 2'-O-methyladenosine
  modified_base 14: mod_base = OTHER; note = 2'-fluorouridine
  modified_base 15: mod_base = um
  modified_base 16: mod_base = OTHER; note = 2'-fluorouridine
  modified_base 17: mod_base = um
  modified_base 18: mod_base = cm
  modified_base 19: mod_base = cm
  modified_base 20: mod_base = cm
  modified_base 21: mod_base = OTHER; note = 2'-O-methyluridine with a 3'-phosphorothioate linkage
  modified_base 22: mod_base = OTHER; note = 2'-O-methyluridine with a 3'-phosphorothioate linkage
  modified_base 23: mod_base = OTHER; note = 2'-O-methyladenosine
tccacgagcaatattttccctta

SEQ ID NO: 2060 - RNA, 23 nt, synthetic construct
  source 1..23: mol_type = other RNA
  modified_base 1: mod_base = OTHER; note = 2'-O-methyluridine with a 3'-phosphorothioate linkage
  modified_base 2: mod_base = OTHER; note = 2'-fluorouridine with a 3'-phosphorothioate linkage
  modified_base 3: mod_base = cm
  modified_base 4: mod_base = cm
  modified_base 5: mod_base = OTHER; note = 2'-fluoroadenosine
  modified_base 6: mod_base = cm
  modified_base 7: mod_base = OTHER; note = 2'-fluoroguanosine
  modified_base 8: mod_base = OTHER; note = 2'-O-methyladenosine
  modified_base 9: mod_base = gm
  modified_base 10: mod_base = cm
  modified_base 11: mod_base = OTHER; note = 2'-O-methyladenosine
  modified_base 12: mod_base = OTHER; note = 2'-O-methyladenosine
  modified_base 13: mod_base = um
  modified_base 14: mod_base = OTHER; note = 2'-fluoroadenosine
  modified_base 15: mod_base = um
  modified_base 16: mod_base = OTHER; note = 2'-fluorouridine
  modified_base 17: mod_base = um
  modified_base 18: mod_base = um
  modified_base 19: mod_base = cm
  modified_base 20: mod_base = cm
  modified_base 21: mod_base = OTHER; note = 2'-O-methylcytidine with a 3'-phosphorothioate linkage
  modified_base 22: mod_base = OTHER; note = 2'-O-methyluridine with a 3'-phosphorothioate linkage
  modified_base 23: mod_base = um
ttccacgagcaatattttccctt

SEQ ID NO: 2061 - RNA, 23 nt, synthetic construct
  source 1..23: mol_type = other RNA
  modified_base 1: mod_base = OTHER; note = 2'-O-methyluridine with a 3'-phosphorothioate linkage
  modified_base 2: mod_base = OTHER; note = 2'-fluorouridine with a 3'-phosphorothioate linkage
  modified_base 3: mod_base = um
  modified_base 4: mod_base = cm
  modified_base 5: mod_base = OTHER; note = 2'-fluorocytidine
  modified_base 6: mod_base = OTHER; note = 2'-O-methyladenosine
  modified_base 7: mod_base = OTHER; note = 2'-fluorocytidine
  modified_base 8: mod_base = gm
  modified_base 9: mod_base = OTHER; note = 2'-O-methyladenosine
  modified_base 10: mod_base = gm
  modified_base 11: mod_base = cm
  modified_base 12: mod_base = OTHER; note = 2'-O-methyladenosine
  modified_base 13: mod_base = OTHER; note = 2'-O-methyladenosine
  modified_base 14: mod_base = OTHER; note = 2'-fluorouridine
  modified_base 15: mod_base = OTHER; note = 2'-O-methyladenosine
  modified_base 16: mod_base = OTHER; note = 2'-fluorouridine
  modified_base 17: mod_base = um
  modified_base 18: mod_base = um
  modified_base 19: mod_base = um
  modified_base 20: mod_base = cm
  modified_base 21: mod_base = OTHER; note = 2'-O-methylcytidine with a 3'-phosphorothioate linkage
  modified_base 22: mod_base = OTHER; note = 2'-O-methylcytidine with a 3'-phosphorothioate linkage
  modified_base 23: mod_base = um
tttccacgagcaatattttccct

SEQ ID NO: 2062 - RNA, 23 nt, synthetic construct
  source 1..23: mol_type = other RNA
  modified_base 1: mod_base = OTHER; note = 2'-O-methyluridine with a 3'-phosphorothioate linkage
  modified_base 2: mod_base = OTHER; note = 2'-fluorocytidine with a 3'-phosphorothioate linkage
  modified_base 3: mod_base = cm
  modified_base 4: mod_base = OTHER; note = 2'-O-methyladenosine
  modified_base 5: mod_base = OTHER; note = 2'-fluorouridine
  modified_base 6: mod_base = um
  modified_base 7: mod_base = OTHER; note = 2'-fluorocytidine
  modified_base 8: mod_base = cm
  modified_base 9: mod_base = OTHER; note = 2'-O-methyladenosine
  modified_base 10: mod_base = cm
  modified_base 11: mod_base = gm
  modified_base 12: mod_base = OTHER; note = 2'-O-methyladenosine
  modified_base 13: mod_base = gm
  modified_base 14: mod_base = OTHER; note = 2'-fluorocytidine
  modified_base 15: mod_base = OTHER; note = 2'-O-methyladenosine
  modified_base 16: mod_base = OTHER; note = 2'-fluoroadenosine
  modified_base 17: mod_base = um
  modified_base 18: mod_base = OTHER; note = 2'-O-methyladenosine
  modified_base 19: mod_base = um
  modified_base 20: mod_base = um
  modified_base 21: mod_base = OTHER; note = 2'-O-methyluridine with a 3'-phosphorothioate linkage
  modified_base 22: mod_base = OTHER; note = 2'-O-methyluridine with a 3'-phosphorothioate linkage
  modified_base 23: mod_base = cm
tccattccacgagcaatattttc

SEQ ID NO: 2063 - RNA, 23 nt, synthetic construct
  source 1..23: mol_type = other RNA
  modified_base 1: mod_base = OTHER; note = 2'-O-methyluridine with a 3'-phosphorothioate linkage
  modified_base 2: mod_base = OTHER; note = 2'-fluoroguanosine with a 3'-phosphorothioate linkage
  modified_base 3: mod_base = cm
  modified_base 4: mod_base = cm
  modified_base 5: mod_base = OTHER; note = 2'-fluoroadenosine
  modified_base 6: mod_base = um
  modified_base 7: mod_base = OTHER; note = 2'-fluorouridine
  modified_base 8: mod_base = cm
  modified_base 9: mod_base = cm
  modified_base 10: mod_base = OTHER; note = 2'-O-methyladenosine
  modified_base 11: mod_base = cm
  modified_base 12: mod_base = gm
  modified_base 13: mod_base = OTHER; note = 2'-O-methyladenosine
  modified_base 14: mod_base = OTHER; note = 2'-fluoroguanosine
  modified_base 15: mod_base = cm
  modified_base 16: mod_base = OTHER; note = 2'-fluoroadenosine
  modified_base 17: mod_base = OTHER; note = 2'-O-methyladenosine
  modified_base 18: mod_base = um
  modified_base 19: mod_base = OTHER; note = 2'-O-methyladenosine
  modified_base 20: mod_base = um
  modified_base 21: mod_base = OTHER; note = 2'-O-methyluridine with a 3'-phosphorothioate linkage
  modified_base 22: mod_base = OTHER; note = 2'-O-methyluridine with a 3'-phosphorothioate linkage
  modified_base 23: mod_base = um
tgccattccacgagcaatatttt

SEQ ID NO: 2064 - RNA, 23 nt, synthetic construct
  source 1..23: mol_type = other RNA
  modified_base 1: mod_base = OTHER; note = 2'-O-methyluridine with a 3'-phosphorothioate linkage
  modified_base 2: mod_base = OTHER; note = 2'-fluorouridine with a 3'-phosphorothioate linkage
  modified_base 3: mod_base = gm
  modified_base 4: mod_base = cm
  modified_base 5: mod_base = OTHER; note = 2'-fluorocytidine
  modified_base 6: mod_base = OTHER; note = 2'-O-methyladenosine
  modified_base 7: mod_base = OTHER; note = 2'-fluorouridine
  modified_base 8: mod_base = um
  modified_base 9: mod_base = cm
  modified_base 10: mod_base = cm
  modified_base 11: mod_base = OTHER; note = 2'-O-methyladenosine
  modified_base 12: mod_base = cm
  modified_base 13: mod_base = gm
  modified_base 14: mod_base = OTHER; note = 2'-fluoroadenosine
  modified_base 15: mod_base = gm
  modified_base 16: mod_base = OTHER; note = 2'-fluorocytidine
  modified_base 17: mod_base = OTHER; note = 2'-O-methyladenosine
  modified_base 18: mod_base = OTHER; note = 2'-O-methyladenosine
  modified_base 19: mod_base = um
  modified_base 20: mod_base = OTHER; note = 2'-O-methyladenosine
  modified_base 21: mod_base = OTHER; note = 2'-O-methyluridine with a 3'-phosphorothioate linkage
  modified_base 22: mod_base = OTHER; note = 2'-O-methyluridine with a 3'-phosphorothioate linkage
  modified_base 23: mod_base = um
ttgccattccacgagcaatattt

SEQ ID NO: 2065 - RNA, 23 nt, synthetic construct
  source 1..23: mol_type = other RNA
  modified_base 1: mod_base = OTHER; note = 2'-O-methyluridine with a 3'-phosphorothioate linkage
  modified_base 2: mod_base = OTHER; note = 2'-fluorouridine with a 3'-phosphorothioate linkage
  modified_base 3: mod_base = um
  modified_base 4: mod_base = gm
  modified_base 5: mod_base = OTHER; note = 2'-fluorocytidine
  modified_base 6: mod_base = cm
  modified_base 7: mod_base = OTHER; note = 2'-fluoroadenosine
  modified_base 8: mod_base = um
  modified_base 9: mod_base = um
  modified_base 10: mod_base = cm
  modified_base 11: mod_base = cm
  modified_base 12: mod_base = OTHER; note = 2'-O-methyladenosine
  modified_base 13: mod_base = cm
  modified_base 14: mod_base = OTHER; note = 2'-fluoroguanosine
  modified_base 15: mod_base = OTHER; note = 2'-O-methyladenosine
  modified_base 16: mod_base = OTHER; note = 2'-fluoroguanosine
  modified_base 17: mod_base = cm
  modified_base 18: mod_base = OTHER; note = 2'-O-methyladenosine
  modified_base 19: mod_base = OTHER; note = 2'-O-methyladenosine
  modified_base 20: mod_base = um
  modified_base 21: mod_base = OTHER; note = 2'-O-methyladenosine with a 3'-phosphorothioate linkage
  modified_base 22: mod_base = OTHER; note = 2'-O-methyluridine with a 3'-phosphorothioate linkage
  modified_base 23: mod_base = um
tttgccattccacgagcaatatt

SEQ ID NO: 2066 - RNA, 23 nt, synthetic construct
  source 1..23: mol_type = other RNA
  modified_base 1: mod_base = OTHER; note = 2'-O-methyluridine with a 3'-phosphorothioate linkage
  modified_base 2: mod_base = OTHER; note = 2'-fluoroadenosine with a 3'-phosphorothioate linkage
  modified_base 3: mod_base = um
  modified_base 4: mod_base = um
  modified_base 5: mod_base = OTHER; note = 2'-fluoroguanosine
  modified_base 6: mod_base = cm
  modified_base 7: mod_base = OTHER; note = 2'-fluorocytidine
  modified_base 8: mod_base = OTHER; note = 2'-O-methyladenosine
  modified_base 9: mod_base = um
  modified_base 10: mod_base = um
  modified_base 11: mod_base = cm
  modified_base 12: mod_base = cm
  modified_base 13: mod_base = OTHER; note = 2'-O-methyladenosine
  modified_base 14: mod_base = OTHER; note = 2'-fluorocytidine
  modified_base 15: mod_base = gm
  modified_base 16: mod_base = OTHER; note = 2'-fluoroadenosine
  modified_base 17: mod_base = gm
  modified_base 18: mod_base = cm
  modified_base 19: mod_base = OTHER; note = 2'-O-methyladenosine
  modified_base 20: mod_base = OTHER; note = 2'-O-methyladenosine
  modified_base 21: mod_base = OTHER; note = 2'-O-methyluridine with a 3'-phosphorothioate linkage
  modified_base 22: mod_base = OTHER; note = 2'-O-methyladenosine with a 3'-phosphorothioate linkage
  modified_base 23: mod_base = um
tattgccattccacgagcaatat

SEQ ID NO: 2067 - RNA, 23 nt, synthetic construct
  source 1..23: mol_type = other RNA
  modified_base 1: mod_base = OTHER; note = 2'-O-methyluridine with a 3'-phosphorothioate linkage
  modified_base 2: mod_base = OTHER; note = 2'-fluoroadenosine with a 3'-phosphorothioate linkage
  modified_base 3: mod_base = OTHER; note = 2'-O-methyladenosine
  modified_base 4: mod_base = um
  modified_base 5: mod_base = OTHER; note = 2'-fluorouridine
  modified_base 6: mod_base = gm
  modified_base 7: mod_base = OTHER; note = 2'-fluorocytidine
  modified_base 8: mod_base = cm
  modified_base 9: mod_base = OTHER; note = 2'-O-methyladenosine
  modified_base 10: mod_base = um
  modified_base 11: mod_base = um
  modified_base 12: mod_base = cm
  modified_base 13: mod_base = cm
  modified_base 14: mod_base = OTHER; note = 2'-fluoroadenosine
  modified_base 15: mod_base = cm
  modified_base 16: mod_base = OTHER; note = 2'-fluoroguanosine
  modified_base 17: mod_base = OTHER; note = 2'-O-methyladenosine
  modified_base 18: mod_base = gm
  modified_base 19: mod_base = cm
  modified_base 20: mod_base = OTHER; note = 2'-O-methyladenosine
  modified_base 21: mod_base = OTHER; note = 2'-O-methyladenosine with a 3'-phosphorothioate linkage
  modified_base 22: mod_base = OTHER; note = 2'-O-methyluridine with a 3'-phosphorothioate linkage
  modified_base 23: mod_base = OTHER; note = 2'-O-methyladenosine
taattgccattccacgagcaata

SEQ ID NO: 2068 - RNA, 23 nt, synthetic construct
  source 1..23: mol_type = other RNA
  modified_base 1: mod_base = OTHER; note = 2'-O-methyluridine with a 3'-phosphorothioate linkage
  modified_base 2: mod_base = OTHER; note = 2'-fluorouridine with a 3'-phosphorothioate linkage
  modified_base 3: mod_base = cm
  modified_base 4: mod_base = cm
  modified_base 5: mod_base = OTHER; note = 2'-fluoroadenosine
  modified_base 6: mod_base = OTHER; note = 2'-O-methyladenosine
  modified_base 7: mod_base = OTHER; note = 2'-fluorouridine
  modified_base 8: mod_base = cm
  modified_base 9: mod_base = OTHER; note = 2'-O-methyladenosine
  modified_base 10: mod_base = cm
  modified_base 11: mod_base = OTHER; note = 2'-O-methyladenosine
  modified_base 12: mod_base = OTHER; note = 2'-O-methyladenosine
  modified_base 13: mod_base = gm
  modified_base 14: mod_base = OTHER; note = 2'-fluoroadenosine
  modified_base 15: mod_base = cm
  modified_base 16: mod_base = OTHER; note = 2'-fluoroadenosine
  modified_base 17: mod_base = um
  modified_base 18: mod_base = um
  modified_base 19: mod_base = cm
  modified_base 20: mod_base = OTHER; note = 2'-O-methyladenosine
  modified_base 21: mod_base = OTHER; note = 2'-O-methyladenosine with a 3'-phosphorothioate linkage
  modified_base 22: mod_base = OTHER; note = 2'-O-methylcytidine with a 3'-phosphorothioate linkage
  modified_base 23: mod_base = OTHER; note = 2'-O-methyladenosine
ttccaatcacaagacattcaaca

SEQ ID NO: 2069 - RNA, 23 nt, synthetic construct
  source 1..23: mol_type = other RNA
  modified_base 1: mod_base = OTHER; note = 2'-O-methyluridine with a 3'-phosphorothioate linkage
  modified_base 2: mod_base = OTHER; note = 2'-fluorocytidine with a 3'-phosphorothioate linkage
  modified_base 3: mod_base = um
  modified_base 4: mod_base = cm
  modified_base 5: mod_base = OTHER; note = 2'-fluorocytidine
  modified_base 6: mod_base = OTHER; note = 2'-O-methyladenosine
  modified_base 7: mod_base = OTHER; note = 2'-fluoroadenosine
  modified_base 8: mod_base = um
  modified_base 9: mod_base = cm
  modified_base 10: mod_base = OTHER; note = 2'-O-methyladenosine
  modified_base 11: mod_base = cm
  modified_base 12: mod_base = OTHER; note = 2'-O-methyladenosine
  modified_base 13: mod_base = OTHER; note = 2'-O-methyladenosine
  modified_base 14: mod_base = OTHER; note = 2'-fluoroguanosine
  modified_base 15: mod_base = OTHER; note = 2'-O-methyladenosine
  modified_base 16: mod_base = OTHER; note = 2'-fluorocytidine
  modified_base 17: mod_base = OTHER; note = 2'-O-methyladenosine
  modified_base 18: mod_base = um
  modified_base 19: mod_base = um
  modified_base 20: mod_base = cm
  modified_base 21: mod_base = OTHER; note = 2'-O-methyladenosine with a 3'-phosphorothioate linkage
  modified_base 22: mod_base = OTHER; note = 2'-O-methyladenosine with a 3'-phosphorothioate linkage
  modified_base 23: mod_base = cm
tctccaatcacaagacattcaac

SEQ ID NO: 2070 - RNA, 23 nt, synthetic construct
  source 1..23: mol_type = other RNA
  modified_base 1: mod_base = OTHER; note = 2'-O-methyluridine with a 3'-phosphorothioate linkage
  modified_base 2: mod_base = OTHER; note = 2'-fluorouridine with a 3'-phosphorothioate linkage
  modified_base 3: mod_base = OTHER; note = 2'-O-methyladenosine
  modified_base 4: mod_base = cm
  modified_base 5: mod_base = OTHER; note = 2'-fluorocytidine
  modified_base 6: mod_base = OTHER; note = 2'-O-methyladenosine
  modified_base 7: mod_base = OTHER; note = 2'-fluoroadenosine
  modified_base 8: mod_base = cm
  modified_base 9: mod_base = um
  modified_base 10: mod_base = cm
  modified_base 11: mod_base = cm
  modified_base 12: mod_base = OTHER; note = 2'-O-methyladenosine
  modified_base 13: mod_base = OTHER; note = 2'-O-methyladenosine
  modified_base 14: mod_base = OTHER; note = 2'-fluorouridine
  modified_base 15: mod_base = cm
  modified_base 16: mod_base = OTHER; note = 2'-fluoroadenosine
  modified_base 17: mod_base = cm
  modified_base 18: mod_base = OTHER; note = 2'-O-methyladenosine
  modified_base 19: mod_base = OTHER; note = 2'-O-methyladenosine
  modified_base 20: mod_base = gm
  modified_base 21: mod_base = OTHER; note = 2'-O-methyladenosine with a 3'-phosphorothioate linkage
  modified_base 22: mod_base = OTHER; note = 2'-O-methylcytidine with a 3'-phosphorothioate linkage
  modified_base 23: mod_base = OTHER; note = 2'-O-methyladenosine
ttaccaactccaatcacaagaca

SEQ ID NO: 2071 - RNA, 23 nt, synthetic construct
  source 1..23: mol_type = other RNA
  modified_base 1: mod_base = OTHER; note = 2'-O-methyluridine with a 3'-phosphorothioate linkage
  modified_base 2: mod_base = OTHER; note = 2'-fluoroguanosine with a 3'-phosphorothioate linkage
  modified_base 3: mod_base = um
  modified_base 4: mod_base = OTHER; note = 2'-O-methyladenosine
  modified_base 5: mod_base = OTHER; note = 2'-fluorocytidine
  modified_base 6: mod_base = cm
  modified_base 7: mod_base = OTHER; note = 2'-fluoroadenosine
  modified_base 8: mod_base = OTHER; note = 2'-O-methyladenosine
  modified_base 9: mod_base = cm
  modified_base 10: mod_base = um
  modified_base 11: mod_base = cm
  modified_base 12: mod_base = cm
  modified_base 13: mod_base = OTHER; note = 2'-O-methyladenosine
  modified_base 14: mod_base = OTHER; note = 2'-fluoroadenosine
  modified_base 15: mod_base = um
  modified_base 16: mod_base = OTHER; note = 2'-fluorocytidine
  modified_base 17: mod_base = OTHER; note = 2'-O-methyladenosine
  modified_base 18: mod_base = cm
  modified_base 19: mod_base = OTHER; note = 2'-O-methyladenosine
  modified_base 20: mod_base = OTHER; note = 2'-O-methyladenosine
  modified_base 21: mod_base = OTHER; note = 2'-O-methylguanosine with a 3'-phosphorothioate linkage
  modified_base 22: mod_base = OTHER; note = 2'-O-methyladenosine with a 3'-phosphorothioate linkage
  modified_base 23: mod_base = cm
tgtaccaactccaatcacaagac

SEQ ID NO: 2072 - RNA, 23 nt, synthetic construct
  source 1..23: mol_type = other RNA
  modified_base 1: mod_base = OTHER; note = 2'-O-methyluridine with a 3'-phosphorothioate linkage
  modified_base 2: mod_base = OTHER; note = 2'-fluoroguanosine with a 3'-phosphorothioate linkage
  modified_base 3: mod_base = gm
  modified_base 4: mod_base = um
  modified_base 5: mod_base = OTHER; note = 2'-fluoroadenosine
  modified_base 6: mod_base = cm
  modified_base 7: mod_base = OTHER; note = 2'-fluorocytidine
  modified_base 8: mod_base = OTHER; note = 2'-O-methyladenosine
  modified_base 9: mod_base = OTHER; note = 2'-O-methyladenosine
  modified_base 10: mod_base = cm
  modified_base 11: mod_base = um
  modified_base 12: mod_base = cm
  modified_base 13: mod_base = cm
  modified_base 14: mod_base = OTHER; note = 2'-fluoroadenosine
  modified_base 15: mod_base = OTHER; note = 2'-O-methyladenosine
  modified_base 16: mod_base = OTHER; note = 2'-fluorouridine
  modified_base 17: mod_base = cm
  modified_base 18: mod_base = OTHER; note = 2'-O-methyladenosine
  modified_base 19: mod_base = cm
  modified_base 20: mod_base = OTHER; note = 2'-O-methyladenosine
  modified_base 21: mod_base = OTHER; note = 2'-O-methyladenosine with a 3'-phosphorothioate linkage
  modified_base 22: mod_base = OTHER; note = 2'-O-methylguanosine with a 3'-phosphorothioate linkage
  modified_base 23: mod_base = OTHER; note = 2'-O-methyladenosine
tggtaccaactccaatcacaaga

SEQ ID NO: 2073 - RNA, 23 nt, synthetic construct
  source 1..23: mol_type = other RNA
  modified_base 1: mod_base = OTHER; note = 2'-O-methyluridine with a 3'-phosphorothioate linkage
  modified_base 2: mod_base = OTHER; note = 2'-fluoroadenosine with a 3'-phosphorothioate linkage
  modified_base 3: mod_base = um
  modified_base 4: mod_base = gm
  modified_base 5: mod_base = OTHER; note = 2'-fluoroguanosine
  modified_base 6: mod_base = um
  modified_base 7: mod_base = OTHER; note = 2'-fluoroadenosine
  modified_base 8: mod_base = cm
  modified_base 9: mod_base = cm
  modified_base 10: mod_base = OTHER; note = 2'-O-methyladenosine
  modified_base 11: mod_base = OTHER; note = 2'-O-methyladenosine
  modified_base 12: mod_base = cm
  modified_base 13: mod_base = um
  modified_base 14: mod_base = OTHER; note = 2'-fluorocytidine
  modified_base 15: mod_base = cm
  modified_base 16: mod_base = OTHER; note = 2'-fluoroadenosine
  modified_base 17: mod_base = OTHER; note = 2'-O-methyladenosine
  modified_base 18: mod_base = um
  modified_base 19: mod_base = cm
  modified_base 20: mod_base = OTHER; note = 2'-O-methyladenosine
  modified_base 21: mod_base = OTHER; note = 2'-O-methylcytidine with a 3'-phosphorothioate linkage
  modified_base 22: mod_base = OTHER; note = 2'-O-methyladenosine with a 3'-phosphorothioate linkage
  modified_base 23: mod_base = OTHER; note = 2'-O-methyladenosine
tatggtaccaactccaatcacaa

SEQ ID NO: 2074 - RNA, 23 nt, synthetic construct
  source 1..23: mol_type = other RNA
  modified_base 1: mod_base = OTHER; note = 2'-O-methyluridine with a 3'-phosphorothioate linkage
  modified_base 2: mod_base = OTHER; note = 2'-fluoroadenosine with a 3'-phosphorothioate linkage
  modified_base 3: mod_base = cm
  modified_base 4: mod_base = OTHER; note = 2'-O-methyladenosine
  modified_base 5: mod_base = OTHER; note = 2'-fluorouridine
  modified_base 6: mod_base = gm
  modified_base 7: mod_base = OTHER; note = 2'-fluoroguanosine
  modified_base 8: mod_base = um
  modified_base 9: mod_base = OTHER; note = 2'-O-methyladenosine
  modified_base 10: mod_base = cm
  modified_base 11: mod_base = cm
  modified_base 12: mod_base = OTHER; note = 2'-O-methyladenosine
  modified_base 13: mod_base = OTHER; note = 2'-O-methyladenosine
  modified_base 14: mod_base = OTHER; note = 2'-fluorocytidine
  modified_base 15: mod_base = um
  modified_base 16: mod_base = OTHER; note = 2'-fluorocytidine
  modified_base 17: mod_base = cm
  modified_base 18: mod_base = OTHER; note = 2'-O-methyladenosine
  modified_base 19: mod_base = OTHER; note = 2'-O-methyladenosine
  modified_base 20: mod_base = um
  modified_base 21: mod_base = OTHER; note = 2'-O-methylcytidine with a 3'-phosphorothioate linkage
  modified_base 22: mod_base = OTHER; note = 2'-O-methyladenosine with a 3'-phosphorothioate linkage
  modified_base 23: mod_base = cm
tacatggtaccaactccaatcac

SEQ ID NO: 2075 - RNA, 23 nt, synthetic construct
  source 1..23: mol_type = other RNA
  modified_base 1: mod_base = OTHER; note = 2'-O-methyluridine with a 3'-phosphorothioate linkage
  modified_base 2: mod_base = OTHER; note = 2'-fluoroguanosine with a 3'-phosphorothioate linkage
  modified_base 3: mod_base = OTHER; note = 2'-O-methyladenosine
  modified_base 4: mod_base = cm
  modified_base 5: mod_base = OTHER; note = 2'-fluoroadenosine
  modified_base 6: mod_base = um
  modified_base 7: mod_base = OTHER; note = 2'-fluoroguanosine
  modified_base 8: mod_base = gm
  modified_base 9: mod_base = um
  modified_base 10: mod_base = OTHER; note = 2'-O-methyladenosine
  modified_base 11: mod_base = cm
  modified_base 12: mod_base = cm
  modified_base 13: mod_base = OTHER; note = 2'-O-methyladenosine
  modified_base 14: mod_base = OTHER; note = 2'-fluoroadenosine
  modified_base 15: mod_base = cm
  modified_base 16: mod_base = OTHER; note = 2'-fluorouridine
  modified_base 17: mod_base = cm
  modified_base 18: mod_base = cm
  modified_base 19: mod_base = OTHER; note = 2'-O-methyladenosine
  modified_base 20: mod_base = OTHER; note = 2'-O-methyladenosine
  modified_base 21: mod_base = OTHER; note = 2'-O-methyluridine with a 3'-phosphorothioate linkage
  modified_base 22: mod_base = OTHER; note = 2'-O-methylcytidine with a 3'-phosphorothioate linkage
  modified_base 23: mod_base = OTHER; note = 2'-O-methyladenosine
tgacatggtaccaactccaatca

SEQ ID NO: 2076 - RNA, 23 nt, synthetic construct
  source 1..23: mol_type = other RNA
  modified_base 1: mod_base = OTHER; note = 2'-O-methyluridine with a 3'-phosphorothioate linkage
  modified_base 2: mod_base = OTHER; note = 2'-fluorocytidine with a 3'-phosphorothioate linkage
  modified_base 3: mod_base = um
  modified_base 4: mod_base = gm
  modified_base 5: mod_base = OTHER; note = 2'-fluoroadenosine
  modified_base 6: mod_base = cm
  modified_base 7: mod_base = OTHER; note = 2'-fluoroadenosine
  modified_base 8: mod_base = um
  modified_base 9: mod_base = gm
  modified_base 10: mod_base = gm
  modified_base 11: mod_base = um
  modified_base 12: mod_base = OTHER; note = 2'-O-methyladenosine
  modified_base 13: mod_base = cm
  modified_base 14: mod_base = OTHER; note = 2'-fluorocytidine
  modified_base 15: mod_base = OTHER; note = 2'-O-methyladenosine
  modified_base 16: mod_base = OTHER; note = 2'-fluoroadenosine
  modified_base 17: mod_base = cm
  modified_base 18: mod_base = um
  modified_base 19: mod_base = cm
  modified_base 20: mod_base = cm
  modified_base 21: mod_base = OTHER; note = 2'-O-methyladenosine with a 3'-phosphorothioate linkage
  modified_base 22: mod_base = OTHER; note = 2'-O-methyladenosine with a 3'-phosphorothioate linkage
  modified_base 23: mod_base = um
tctgacatggtaccaactccaat

SEQ ID NO: 2077 - RNA, 23 nt, synthetic construct
  source 1..23: mol_type = other RNA
  modified_base 1: mod_base = OTHER; note = 2'-O-methyluridine with a 3'-phosphorothioate linkage
  modified_base 2: mod_base = OTHER; note = 2'-fluorocytidine with a 3'-phosphorothioate linkage
  modified_base 3: mod_base = cm
  modified_base 4: mod_base = um
  modified_base 5: mod_base = OTHER; note = 2'-fluoroguanosine
  modified_base 6: mod_base = OTHER; note = 2'-O-methyladenosine
  modified_base 7: mod_base = OTHER; note = 2'-fluorocytidine
  modified_base 8: mod_base = OTHER; note = 2'-O-methyladenosine
  modified_base 9: mod_base = um
  modified_base 10: mod_base = gm
  modified_base 11: mod_base = gm
  modified_base 12: mod_base = um
  modified_base 13: mod_base = OTHER; note = 2'-O-methyladenosine
  modified_base 14: mod_base = OTHER; note = 2'-fluorocytidine
  modified_base 15: mod_base = cm
  modified_base 16: mod_base = OTHER; note = 2'-fluoroadenosine
  modified_base 17: mod_base = OTHER; note = 2'-O-methyladenosine
  modified_base 18: mod_base = cm
  modified_base 19: mod_base = um
  modified_base 20: mod_base = cm
  modified_base 21: mod_base = OTHER; note = 2'-O-methylcytidine with a 3'-phosphorothioate linkage
  modified_base 22: mod_base = OTHER; note = 2'-O-methyladenosine with a 3'-phosphorothioate linkage
  modified_base 23: mod_base = OTHER; note = 2'-O-methyladenosine
tcctgacatggtaccaactccaa

SEQ ID NO: 2078 - RNA, 23 nt, synthetic construct
  source 1..23: mol_type = other RNA
  modified_base 1: mod_base = OTHER; note = 2'-O-methyluridine with a 3'-phosphorothioate linkage
  modified_base 2: mod_base = OTHER; note = 2'-fluorouridine with a 3'-phosphorothioate linkage
  modified_base 3: mod_base = gm
  modified_base 4: mod_base = cm
  modified_base 5: mod_base = OTHER; note = 2'-fluoroadenosine
  modified_base 6: mod_base = gm
  modified_base 7: mod_base = OTHER; note = 2'-fluorocytidine
  modified_base 8: mod_base = cm
  modified_base 9: mod_base = OTHER; note = 2'-O-methyladenosine
  modified_base 10: mod_base = OTHER; note = 2'-O-methyladenosine
  modified_base 11: mod_base = OTHER; note = 2'-O-methyladenosine
  modified_base 12: mod_base = gm
  modified_base 13: mod_base = cm
  modified_base 14: mod_base = OTHER; note = 2'-fluoroadenosine
  modified_base 15: mod_base = gm
  modified_base 16: mod_base = OTHER; note = 2'-fluorocytidine
  modified_base 17: mod_base = OTHER; note = 2'-O-methyladenosine
  modified_base 18: mod_base = cm
  modified_base 19: mod_base = OTHER; note = 2'-O-methyladenosine
  modified_base 20: mod_base = um
  modified_base 21: mod_base = OTHER; note = 2'-O-methyladenosine with a 3'-phosphorothioate linkage
  modified_base 22: mod_base = OTHER; note = 2'-O-methyladenosine with a 3'-phosphorothioate linkage
  modified_base 23: mod_base = um
ttgcagccaaagcagcacataat

SEQ ID NO: 2079 - RNA, 23 nt, synthetic construct
  source 1..23: mol_type = other RNA
  modified_base 1: mod_base = OTHER; note = 2'-O-methyluridine with a 3'-phosphorothioate linkage
  modified_base 2: mod_base = OTHER; note = 2'-fluoroguanosine with a 3'-phosphorothioate linkage
  modified_base 3: mod_base = OTHER; note = 2'-O-methyladenosine
  modified_base 4: mod_base = OTHER; note = 2'-O-methyladenosine
  modified_base 5: mod_base = OTHER; note = 2'-fluorocytidine
  modified_base 6: mod_base = OTHER; note = 2'-O-methyladenosine
  modified_base 7: mod_base = OTHER; note = 2'-fluorocytidine
  modified_base 8: mod_base = gm
  modified_base 9: mod_base = OTHER; note = 2'-O-methyladenosine
  modified_base 10: mod_base = OTHER; note = 2'-O-methyladenosine
  modified_base 11: mod_base = gm
  modified_base 12: mod_base = um
  modified_base 13: mod_base = OTHER; note = 2'-O-methyladenosine
  modified_base 14: mod_base = OTHER; note = 2'-fluoroguanosine
  modified_base 15: mod_base = um
  modified_base 16: mod_base = OTHER; note = 2'-fluorouridine
  modified_base 17: mod_base = gm
  modified_base 18: mod_base = gm
  modified_base 19: mod_base = cm
  modified_base 20: mod_base = OTHER; note = 2'-O-methyladenosine
  modified_base 21: mod_base = OTHER; note = 2'-O-methyladenosine with a 3'-phosphorothioate linkage
  modified_base 22: mod_base = OTHER; note = 2'-O-methylguanosine with a 3'-phosphorothioate linkage
  modified_base 23: mod_base = OTHER; note = 2'-O-methyladenosine
tgaacacgaagtagttggcaaga

SEQ ID NO: 2080 - RNA, 23 nt, synthetic construct
  source 1..23: mol_type = other RNA
  modified_base 1: mod_base = OTHER; note = 2'-O-methyluridine with a 3'-phosphorothioate linkage
  modified_base 2: mod_base = OTHER; note = 2'-fluorouridine with a 3'-phosphorothioate linkage
  modified_base 3: mod_base = gm
  modified_base 4: mod_base = OTHER; note = 2'-O-methyladenosine
  modified_base 5: mod_base = OTHER; note = 2'-fluoroadenosine
  modified_base 6: mod_base = cm
  modified_base 7: mod_base = OTHER; note = 2'-fluoroadenosine
  modified_base 8: mod_base = cm
  modified_base 9: mod_base = gm
  modified_base 10: mod_base = OTHER; note = 2'-O-methyladenosine
  modified_base 11: mod_base = OTHER; note = 2'-O-methyladenosine
  modified_base 12: mod_base = gm
  modified_base 13: mod_base = um
  modified_base 14: mod_base = OTHER; note = 2'-fluoroadenosine
  modified_base 15: mod_base = gm
  modified_base 16: mod_base = OTHER; note = 2'-fluorouridine
  modified_base 17: mod_base = um
  modified_base 18: mod_base = gm
  modified_base 19: mod_base = gm
  modified_base 20: mod_base = cm
  modified_base 21: mod_base = OTHER; note = 2'-O-methyladenosine with a 3'-phosphorothioate linkage
  modified_base 22: mod_base = OTHER; note = 2'-O-methyladenosine with a 3'-phosphorothioate linkage
  modified_base 23: mod_base = gm
ttgaacacgaagtagttggcaag

SEQ ID NO: 2081 - RNA, 23 nt, synthetic construct
  source 1..23: mol_type = other RNA
  modified_base 1: mod_base = OTHER; note = 2'-O-methyluridine with a 3'-phosphorothioate linkage
  modified_base 2: mod_base = OTHER; note = 2'-fluoroadenosine with a 3'-phosphorothioate linkage
  modified_base 3: mod_base = um
  modified_base 4: mod_base = gm
  modified_base 5: mod_base = OTHER; note = 2'-fluoroadenosine
  modified_base 6: mod_base = OTHER; note = 2'-O-methyladenosine
  modified_base 7: mod_base = OTHER; note = 2'-fluorocytidine
  modified_base 8: mod_base = OTHER; note = 2'-O-methyladenosine
  modified_base 9: mod_base = cm
  modified_base 10: mod_base = gm
  modified_base 11: mod_base = OTHER; note = 2'-O-methyladenosine
  modified_base 12: mod_base = OTHER; note = 2'-O-methyladenosine
  modified_base 13: mod_base = gm
  modified_base 14: mod_base = OTHER; note = 2'-fluorouridine
  modified_base 15: mod_base = OTHER; note = 2'-O-methyladenosine
  modified_base 16: mod_base = OTHER; note = 2'-fluoroguanosine
  modified_base 17: mod_base = um
  modified_base 18: mod_base = um
  modified_base 19: mod_base = gm
  modified_base 20: mod_base = gm
  modified_base 21: mod_base = OTHER; note = 2'-O-methylcytidine with a 3'-phosphorothioate linkage
  modified_base 22: mod_base = OTHER; note = 2'-O-methyladenosine with a 3'-phosphorothioate linkage
  modified_base 23: mod_base = OTHER; note = 2'-O-methyladenosine
tatgaacacgaagtagttggcaa

SEQ ID NO: 2082 - RNA, 23 nt, synthetic construct
  source 1..23: mol_type = other RNA
  modified_base 1: mod_base = OTHER; note = 2'-O-methyluridine with a 3'-phosphorothioate linkage
  modified_base 2: mod_base = OTHER; note = 2'-fluorocytidine with a 3'-phosphorothioate linkage
  modified_base 3: mod_base = OTHER; note = 2'-O-methyladenosine
  modified_base 4: mod_base = um
  modified_base 5: mod_base = OTHER; note = 2'-fluoroguanosine
  modified_base 6: mod_base = OTHER; note = 2'-O-methyladenosine
  modified_base 7: mod_base = OTHER; note = 2'-fluoroadenosine
  modified_base 8: mod_base = cm
  modified_base 9: mod_base = OTHER; note = 2'-O-methyladenosine
  modified_base 10: mod_base = cm
  modified_base 11: mod_base = gm
  modified_base 12: mod_base = OTHER; note = 2'-O-methyladenosine
  modified_base 13: mod_base = OTHER; note = 2'-O-methyladenosine
  modified_base 14: mod_base = OTHER; note = 2'-fluoroguanosine
  modified_base 15: mod_base = um
  modified_base 16: mod_base = OTHER; note = 2'-fluoroadenosine
  modified_base 17: mod_base = gm
  modified_base 18: mod_base = um
  modified_base 19: mod_base = um
  modified_base 20: mod_base = gm
  modified_base 21: mod_base = OTHER; note = 2'-O-methylguanosine with a 3'-phosphorothioate linkage
  modified_base 22: mod_base = OTHER; note = 2'-O-methylcytidine with a 3'-phosphorothioate linkage
  modified_base 23: mod_base = OTHER; note = 2'-O-methyladenosine
tcatgaacacgaagtagttggca

SEQ ID NO: 2083 - RNA, 23 nt, synthetic construct
  source 1..23: mol_type = other RNA
  modified_base 1: mod_base = OTHER; note = 2'-O-methyluridine with a 3'-phosphorothioate linkage
  modified_base 2: mod_base = OTHER; note = 2'-fluoroguanosine with a 3'-phosphorothioate linkage
  modified_base 3: mod_base = um
  modified_base 4: mod_base = cm
  modified_base 5: mod_base = OTHER; note = 2'-fluoroadenosine
  modified_base 6: mod_base = um
  modified_base 7: mod_base = OTHER; note = 2'-fluoroguanosine
  modified_base 8: mod_base = OTHER; note = 2'-O-methyladenosine
  modified_base 9: mod_base = OTHER; note = 2'-O-methyladenosine
  modified_base 10: mod_base = cm
  modified_base 11: mod_base = OTHER; note = 2'-O-methyladenosine
  modified_base 12: mod_base = cm
  modified_base 13: mod_base = gm
  modified_base 14: mod_base = OTHER; note = 2'-fluoroadenosine
  modified_base 15: mod_base = OTHER; note = 2'-O-methyladenosine
  modified_base 16: mod_base = OTHER; note = 2'-fluoroguanosine
  modified_base 17: mod_base = um
  modified_base 18: mod_base = OTHER; note = 2'-O-methyladenosine
  modified_base 19: mod_base = gm
  modified_base 20: mod_base = um
  modified_base 21: mod_base = OTHER; note = 2'-O-methyluridine with a 3'-phosphorothioate linkage
  modified_base 22: mod_base = OTHER; note = 2'-O-methylguanosine with a 3'-phosphorothioate linkage
  modified_base 23: mod_base = gm
tgtcatgaacacgaagtagttgg

SEQ ID NO: 2084 - RNA, 23 nt, synthetic construct
  source 1..23: mol_type = other RNA
  modified_base 1: mod_base = OTHER; note = 2'-O-methyluridine with a 3'-phosphorothioate linkage
  modified_base 2: mod_base = OTHER; note = 2'-fluorouridine with a 3'-phosphorothioate linkage
  modified_base 3: mod_base = um
  modified_base 4: mod_base = um
  modified_base 5: mod_base = OTHER; note = 2'-fluorocytidine
  modified_base 6: mod_base = cm
  modified_base 7: mod_base = OTHER; note = 2'-fluorocytidine
  modified_base 8: mod_base = gm
  modified_base 9: mod_base = OTHER; note = 2'-O-methyladenosine
  modified_base 10: mod_base = gm
  modified_base 11: mod_base = OTHER; note = 2'-O-methyladenosine
  modified_base 12: mod_base = OTHER; note = 2'-O-methyladenosine
  modified_base 13: mod_base = OTHER; note = 2'-O-methyladenosine
  modified_base 14: mod_base = OTHER; note = 2'-fluoroguanosine
  modified_base 15: mod_base = cm
  modified_base 16: mod_base = OTHER; note = 2'-fluorouridine
  modified_base 17: mod_base = cm
  modified_base 18: mod_base = um
  modified_base 19: mod_base = OTHER; note = 2'-O-methyladenosine
  modified_base 20: mod_base = OTHER; note = 2'-O-methyladenosine
  modified_base 21: mod_base = OTHER; note = 2'-O-methyluridine with a 3'-phosphorothioate linkage
  modified_base 22: mod_base = OTHER; note = 2'-O-methyladenosine with a 3'-phosphorothioate linkage
  modified_base 23: mod_base = cm
ttttcccgagaaagctctaatac

SEQ ID NO: 2085 - RNA, 23 nt, synthetic construct
  source 1..23: mol_type = other RNA
  modified_base 1: mod_base = OTHER; note = 2'-O-methyluridine with a 3'-phosphorothioate linkage
  modified_base 2: mod_base = OTHER; note = 2'-fluorocytidine with a 3'-phosphorothioate linkage
  modified_base 3: mod_base = um
  modified_base 4: mod_base = um
  modified_base 5: mod_base = OTHER; note = 2'-fluorouridine
  modified_base 6: mod_base = cm
  modified_base 7: mod_base = OTHER; note = 2'-fluorocytidine
  modified_base 8: mod_base = cm
  modified_base 9: mod_base = gm
  modified_base 10: mod_base = OTHER; note = 2'-O-methyladenosine
  modified_base 11: mod_base = gm
  modified_base 12: mod_base = OTHER; note = 2'-O-methyladenosine
  modified_base 13: mod_base = OTHER; note = 2'-O-methyladenosine
  modified_base 14: mod_base = OTHER; note = 2'-fluoroadenosine
  modified_base 15: mod_base = gm
  modified_base 16: mod_base = OTHER; note = 2'-fluorocytidine
  modified_base 17: mod_base = um
  modified_base 18: mod_base = cm
  modified_base 19: mod_base = um
  modified_base 20: mod_base = OTHER; note = 2'-O-methyladenosine
  modified_base 21: mod_base = OTHER; note = 2'-O-methyladenosine with a 3'-phosphorothioate linkage
  modified_base 22: mod_base = OTHER; note = 2'-O-methyluridine with a 3'-phosphorothioate linkage
  modified_base 23: mod_base = OTHER; note = 2'-O-methyladenosine
tctttcccgagaaagctctaata

SEQ ID NO: 2086 - RNA, 23 nt, synthetic construct
  source 1..23: mol_type = other RNA
  modified_base 1: mod_base = OTHER; note = 2'-O-methyluridine with a 3'-phosphorothioate linkage
  modified_base 2: mod_base = OTHER; note = 2'-fluoroguanosine with a 3'-phosphorothioate linkage
  modified_base 3: mod_base = cm
  modified_base 4: mod_base = um
  modified_base 5: mod_base = OTHER; note = 2'-fluorouridine
  modified_base 6: mod_base = um
  modified_base 7: mod_base = OTHER; note = 2'-fluorocytidine
  modified_base 8: mod_base = cm
  modified_base 9: mod_base = cm
  modified_base 10: mod_base = gm
  modified_base 11: mod_base = OTHER; note = 2'-O-methyladenosine
  modified_base 12: mod_base = gm
  modified_base 13: mod_base = OTHER; note = 2'-O-methyladenosine
  modified_base 14: mod_base = OTHER; note = 2'-fluoroadenosine
  modified_base 15: mod_base = OTHER; note = 2'-O-methyladenosine
  modified_base 16: mod_base = OTHER; note = 2'-fluoroguanosine
  modified_base 17: mod_base = cm
  modified_base 18: mod_base = um
  modified_base 19: mod_base = cm
  modified_base 20: mod_base = um
  modified_base 21: mod_base = OTHER; note = 2'-O-methyladenosine with a 3'-phosphorothioate linkage
  modified_base 22: mod_base = OTHER; note = 2'-O-methyladenosine with a 3'-phosphorothioate linkage
  modified_base 23: mod_base = um
tgctttcccgagaaagctctaat

SEQ ID NO: 2087 - RNA, 23 nt, synthetic construct
  source 1..23: mol_type = other RNA
  modified_base 1: mod_base = OTHER; note = 2'-O-methyluridine with a 3'-phosphorothioate linkage
  modified_base 2: mod_base = OTHER; note = 2'-fluorocytidine with a 3'-phosphorothioate linkage
  modified_base 3: mod_base = gm
  modified_base 4: mod_base = gm
  modified_base 5: mod_base = OTHER; note = 2'-fluorocytidine
  modified_base 6: mod_base = um
  modified_base 7: mod_base = OTHER; note = 2'-fluorouridine
  modified_base 8: mod_base = um
  modified_base 9: mod_base = cm
  modified_base 10: mod_base = cm
  modified_base 11: mod_base = cm
  modified_base 12: mod_base = gm
  modified_base 13: mod_base = OTHER; note = 2'-O-methyladenosine
  modified_base 14: mod_base = OTHER; note = 2'-fluoroguanosine
  modified_base 15: mod_base = OTHER; note = 2'-O-methyladenosine
  modified_base 16: mod_base = OTHER; note = 2'-fluoroadenosine
  modified_base 17: mod_base = OTHER; note = 2'-O-methyladenosine
  modified_base 18: mod_base = gm
  modified_base 19: mod_base = cm
  modified_base 20: mod_base = um
  modified_base 21: mod_base = OTHER; note = 2'-O-methylcytidine with a 3'-phosphorothioate linkage
  modified_base 22: mod_base = OTHER; note = 2'-O-methyluridine with a 3'-phosphorothioate linkage
  modified_base 23: mod_base = OTHER; note = 2'-O-methyladenosine
tcggctttcccgagaaagctcta

SEQ ID NO: 2088 - RNA, 23 nt, synthetic construct
  source 1..23: mol_type = other RNA
  modified_base 1: mod_base = OTHER; note = 2'-O-methyluridine with a 3'-phosphorothioate linkage
  modified_base 2: mod_base = OTHER; note = 2'-fluoroadenosine with a 3'-phosphorothioate linkage
  modified_base 3: mod_base = cm
  modified_base 4: mod_base = gm
  modified_base 5: mod_base = OTHER; note = 2'-fluoroadenosine
  modified_base 6: mod_base = cm
  modified_base 7: mod_base = OTHER; note = 2'-fluorocytidine
  modified_base 8: mod_base = cm
  modified_base 9: mod_base = um
  modified_base 10: mod_base = cm
  modified_base 11: mod_base = gm
  modified_base 12: mod_base = cm
  modified_base 13: mod_base = gm
  modified_base 14: mod_base = OTHER; note = 2'-fluoroguanosine
  modified_base 15: mod_base = cm
  modified_base 16: mod_base = OTHER; note = 2'-fluorouridine
  modified_base 17: mod_base = um
  modified_base 18: mod_base = um
  modified_base 19: mod_base = cm
  modified_base 20: mod_base = cm
  modified_base 21: mod_base = OTHER; note = 2'-O-methylcytidine with a 3'-phosphorothioate linkage
  modified_base 22: mod_base = OTHER; note = 2'-O-methylguanosine with a 3'-phosphorothioate linkage
  modified_base 23: mod_base = OTHER; note = 2'-O-methyladenosine
tacgaccctcgcggctttcccga

SEQ ID NO: 2089 - RNA, 23 nt, synthetic construct
  source 1..23: mol_type = other RNA
  modified_base 1: mod_base = OTHER; note = 2'-O-methyluridine with a 3'-phosphorothioate linkage
  modified_base 2: mod_base = OTHER; note = 2'-fluoroguanosine with a 3'-phosphorothioate linkage
  modified_base 3: mod_base = OTHER; note = 2'-O-methyladenosine
  modified_base 4: mod_base = cm
  modified_base 5: mod_base = OTHER; note = 2'-fluoroguanosine
  modified_base 6: mod_base = OTHER; note = 2'-O-methyladenosine
  modified_base 7: mod_base = OTHER; note = 2'-fluorocytidine
  modified_base 8: mod_base = cm
  modified_base 9: mod_base = cm
  modified_base 10: mod_base = um
  modified_base 11: mod_base = cm
  modified_base 12: mod_base = gm
  modified_base 13: mod_base = cm
  modified_base 14: mod_base = OTHER; note = 2'-fluoroguanosine
  modified_base 15: mod_base = gm
  modified_base 16: mod_base = OTHER; note = 2'-fluorocytidine
  modified_base 17: mod_base = um
  modified_base 18: mod_base = um
  modified_base 19: mod_base = um
  modified_base 20: mod_base = cm
  modified_base 21: mod_base = OTHER; note = 2'-O-methylcytidine with a 3'-phosphorothioate linkage
  modified_base 22: mod_base = OTHER; note = 2'-O-methylcytidine with a 3'-phosphorothioate linkage
  modified_base 23: mod_base = gm
tgacgaccctcgcggctttcccg

SEQ ID NO: 2090 - RNA, 23 nt, synthetic construct
  source 1..23: mol_type = other RNA
  modified_base 1: mod_base = OTHER; note = 2'-O-methyluridine with a 3'-phosphorothioate linkage
  modified_base 2: mod_base = OTHER; note = 2'-fluoroguanosine with a 3'-phosphorothioate linkage
  modified_base 3: mod_base = gm
  modified_base 4: mod_base = OTHER; note = 2'-O-methyladenosine
  modified_base 5: mod_base = OTHER; note = 2'-fluorocytidine
  modified_base 6: mod_base = gm
  modified_base 7: mod_base = OTHER; note = 2'-fluoroadenosine
  modified_base 8: mod_base = cm
  modified_base 9: mod_base = cm
  modified_base 10: mod_base = cm
  modified_base 11: mod_base = um
  modified_base 12: mod_base = cm
  modified_base 13: mod_base = gm
  modified_base 14: mod_base = OTHER; note = 2'-fluorocytidine
  modified_base 15: mod_base = gm
  modified_base 16: mod_base = OTHER; note = 2'-fluoroguanosine
  modified_base 17: mod_base = cm
  modified_base 18: mod_base = um
  modified_base 19: mod_base = um
  modified_base 20: mod_base = um
  modified_base 21: mod_base = OTHER; note = 2'-O-methylcytidine with a 3'-phosphorothioate linkage
  modified_base 22: mod_base = OTHER; note = 2'-O-methylcytidine with a 3'-phosphorothioate linkage
  modified_base 23: mod_base = cm
tggacgaccctcgcggctttccc

SEQ ID NO: 2091 - RNA, 23 nt, synthetic construct
  source 1..23: mol_type = other RNA
  modified_base 1: mod_base = OTHER; note = 2'-O-methyluridine with a 3'-phosphorothioate linkage
  modified_base 2: mod_base = OTHER; note = 2'-fluorouridine with a 3'-phosphorothioate linkage
  modified_base 3: mod_base = gm
  modified_base 4: mod_base = gm
  modified_base 5: mod_base = OTHER; note = 2'-fluoroadenosine
  modified_base 6: mod_base = cm
  modified_base 7: mod_base = OTHER; note = 2'-fluoroguanosine
  modified_base 8: mod_base = OTHER; note = 2'-O-methyladenosine
  modified_base 9: mod_base = cm
  modified_base 10: mod_base = cm
  modified_base 11: mod_base = cm
  modified_base 12: mod_base = um
  modified_base 13: mod_base = cm
  modified_base 14: mod_base = OTHER; note = 2'-fluoroguanosine
  modified_base 15: mod_base = cm
  modified_base 16: mod_base = OTHER; note = 2'-fluoroguanosine
  modified_base 17: mod_base = gm
  modified_base 18: mod_base = cm
  modified_base 19: mod_base = um
  modified_base 20: mod_base = um
  modified_base 21: mod_base = OTHER; note = 2'-O-methyluridine with a 3'-phosphorothioate linkage
  modified_base 22: mod_base = OTHER; note = 2'-O-methylcytidine with a 3'-phosphorothioate linkage
  modified_base 23: mod_base = cm
ttggacgaccctcgcggctttcc

SEQ ID NO: 2092 - RNA, 23 nt, synthetic construct
  source 1..23: mol_type = other RNA
  modified_base 1: mod_base = OTHER; note = 2'-O-methyluridine with a 3'-phosphorothioate linkage
  modified_base 2: mod_base = OTHER; note = 2'-fluorouridine with a 3'-phosphorothioate linkage
  modified_base 3: mod_base = um
  modified_base 4: mod_base = gm
  modified_base 5: mod_base = OTHER; note = 2'-fluoroguanosine
  modified_base 6: mod_base = OTHER; note = 2'-O-methyladenosine
  modified_base 7: mod_base = OTHER; note = 2'-fluorocytidine
  modified_base 8: mod_base = gm
  modified_base 9: mod_base = OTHER; note = 2'-O-methyladenosine
  modified_base 10: mod_base = cm
  modified_base 11: mod_base = cm
  modified_base 12: mod_base = cm
  modified_base 13: mod_base = um
  modified_base 14: mod_base = OTHER; note = 2'-fluorocytidine
  modified_base 15: mod_base = gm
  modified_base 16: mod_base = OTHER; note = 2'-fluorocytidine
  modified_base 17: mod_base = gm
  modified_base 18: mod_base = gm
  modified_base 19: mod_base = cm
  modified_base 20: mod_base = um
  modified_base 21: mod_base = OTHER; note = 2'-O-methyluridine with a 3'-phosphorothioate linkage
  modified_base 22: mod_base = OTHER; note = 2'-O-methyluridine with a 3'-phosphorothioate linkage
  modified_base 23: mod_base = cm
tttggacgaccctcgcggctttc

SEQ ID NO: 2093 - RNA, 23 nt, synthetic construct
  source 1..23: mol_type = other RNA
  modified_base 1: mod_base = OTHER; note = 2'-O-methyluridine with a 3'-phosphorothioate linkage
  modified_base 2: mod_base = OTHER; note = 2'-fluoroadenosine with a 3'-phosphorothioate linkage
  modified_base 3: mod_base = um
  modified_base 4: mod_base = um
  modified_base 5: mod_base = OTHER; note = 2'-fluoroguanosine
  modified_base 6: mod_base = gm
  modified_base 7: mod_base = OTHER; note = 2'-fluoroadenosine
  modified_base 8: mod_base = cm
  modified_base 9: mod_base = gm
  modified_base 10: mod_base = OTHER; note = 2'-O-methyladenosine
  modified_base 11: mod_base = cm
  modified_base 12: mod_base = cm
  modified_base 13: mod_base = cm
  modified_base 14: mod_base = OTHER; note = 2'-fluorouridine
  modified_base 15: mod_base = cm
  modified_base 16: mod_base = OTHER; note = 2'-fluoroguanosine
  modified_base 17: mod_base = cm
  modified_base 18: mod_base = gm
  modified_base 19: mod_base = gm
  modified_base 20: mod_base = cm
  modified_base 21: mod_base = OTHER; note = 2'-O-methyluridine with a 3'-phosphorothioate linkage
  modified_base 22: mod_base = OTHER; note = 2'-O-methyluridine with a 3'-phosphorothioate linkage
  modified_base 23: mod_base = um
tattggacgaccctcgcggcttt

SEQ ID NO: 2094 - RNA, 23 nt, synthetic construct
  source 1..23: mol_type = other RNA
  modified_base 1: mod_base = OTHER; note = 2'-O-methyluridine with a 3'-phosphorothioate linkage
  modified_base 2: mod_base = OTHER; note = 2'-fluoroadenosine with a 3'-phosphorothioate linkage
  modified_base 3: mod_base = OTHER; note = 2'-O-methyladenosine
  modified_base 4: mod_base = um
  modified_base 5: mod_base = OTHER; note = 2'-fluorouridine
  modified_base 6: mod_base = gm
  modified_base 7: mod_base = OTHER; note = 2'-fluoroguanosine
  modified_base 8: mod_base = OTHER; note = 2'-O-methyladenosine
  modified_base 9: mod_base = cm
  modified_base 10: mod_base = gm
  modified_base 11: mod_base = OTHER; note = 2'-O-methyladenosine
  modified_base 12: mod_base = cm
  modified_base 13: mod_base = cm
  modified_base 14: mod_base = OTHER; note = 2'-fluorocytidine
  modified_base 15: mod_base = um
  modified_base 16: mod_base = OTHER; note = 2'-fluorocytidine
  modified_base 17: mod_base = gm
  modified_base 18: mod_base = cm
  modified_base 19: mod_base = gm
  modified_base 20: mod_base = gm
  modified_base 21: mod_base = OTHER; note = 2'-O-methylcytidine with a 3'-phosphorothioate linkage
  modified_base 22: mod_base = OTHER; note = 2'-O-methyluridine with a 3'-phosphorothioate linkage
  modified_base 23: mod_base = um
taattggacgaccctcgcggctt

SEQ ID NO: 2095 - RNA, 23 nt, synthetic construct
  source 1..23: mol_type = other RNA
  modified_base 1: mod_base = OTHER; note = 2'-O-methyluridine with a 3'-phosphorothioate linkage
  modified_base 2: mod_base = OTHER; note = 2'-fluoroadenosine with a 3'-phosphorothioate linkage
  modified_base 3: mod_base = OTHER; note = 2'-O-methyladenosine
  modified_base 4: mod_base = OTHER; note = 2'-O-methyladenosine
  modified_base 5: mod_base = OTHER; note = 2'-fluorouridine
  modified_base 6: mod_base = um
  modified_base 7: mod_base = OTHER; note = 2'-fluoroguanosine
  modified_base 8: mod_base = gm
  modified_base 9: mod_base = OTHER; note = 2'-O-methyladenosine
  modified_base 10: mod_base = cm
  modified_base 11: mod_base = gm
  modified_base 12: mod_base = OTHER; note = 2'-O-methyladenosine
  modified_base 13: mod_base = cm
  modified_base 14: mod_base = OTHER; note = 2'-fluorocytidine
  modified_base 15: mod_base = cm
  modified_base 16: mod_base = OTHER; note = 2'-fluorouridine
  modified_base 17: mod_base = cm
  modified_base 18: mod_base = gm
  modified_base 19: mod_base = cm
  modified_base 20: mod_base = gm
  modified_base 21: mod_base = OTHER; note = 2'-O-methylguanosine with a 3'-phosphorothioate linkage
  modified_base 22: mod_base = OTHER; note = 2'-O-methylcytidine with a 3'-phosphorothioate linkage
  modified_base 23: mod_base = um
taaattggacgaccctcgcggct

SEQ ID NO: 2096 - RNA, 23 nt, synthetic construct
  source 1..23: mol_type = other RNA
  modified_base 1: mod_base = OTHER; note = 2'-O-methyluridine with a 3'-phosphorothioate linkage
  modified_base 2: mod_base = OTHER; note = 2'-fluorocytidine with a 3'-phosphorothioate linkage
  modified_base 3: mod_base = OTHER; note = 2'-O-methyladenosine
  modified_base 4: mod_base = OTHER; note = 2'-O-methyladenosine
  modified_base 5: mod_base = OTHER; note = 2'-fluoroadenosine
  modified_base 6: mod_base = um
  modified_base 7: mod_base = OTHER; note = 2'-fluorouridine
  modified_base 8: mod_base = gm
  modified_base 9: mod_base = gm
  modified_base 10: mod_base = OTHER; note = 2'-O-methyladenosine
  modified_base 11: mod_base = cm
  modified_base 12: mod_base = gm
  modified_base 13: mod_base = OTHER; note = 2'-O-methyladenosine
  modified_base 14: mod_base = OTHER; note = 2'-fluorocytidine
  modified_base 15: mod_base = cm
  modified_base 16: mod_base = OTHER; note = 2'-fluorocytidine
  modified_base 17: mod_base = um
  modified_base 18: mod_base = cm
  modified_base 19: mod_base = gm
  modified_base 20: mod_base = cm
  modified_base 21: mod_base = OTHER; note = 2'-O-methylguanosine with a 3'-phosphorothioate linkage
  modified_base 22: mod_base = OTHER; note = 2'-O-methylguanosine with a 3'-phosphorothioate linkage
  modified_base 23: mod_base = cm
tcaaattggacgaccctcgcggc

SEQ ID NO: 2097 - RNA, 23 nt, synthetic construct
  source 1..23: mol_type = other RNA
  modified_base 1: mod_base = OTHER; note = 2'-O-methyluridine with a 3'-phosphorothioate linkage
  modified_base 2: mod_base = OTHER; note = 2'-fluorouridine with a 3'-phosphorothioate linkage
  modified_base 3: mod_base = um
  modified_base 4: mod_base = cm
  modified_base 5: mod_base = OTHER; note = 2'-fluorouridine
  modified_base 6: mod_base = um
  modified_base 7: mod_base = OTHER; note = 2'-fluorocytidine
  modified_base 8: mod_base = um
  modified_base 9: mod_base = um
  modified_base 10: mod_base = cm
  modified_base 11: mod_base = um
  modified_base 12: mod_base = OTHER; note = 2'-O-methyladenosine
  modified_base 13: mod_base = OTHER; note = 2'-O-methyladenosine
  modified_base 14: mod_base = OTHER; note = 2'-fluoroadenosine
  modified_base 15: mod_base = OTHER; note = 2'-O-methyladenosine
  modified_base 16: mod_base = OTHER; note = 2'-fluorocytidine
  modified_base 17: mod_base = um
  modified_base 18: mod_base = cm
  modified_base 19: mod_base = gm
  modified_base 20: mod_base = gm
  modified_base 21: mod_base = OTHER; note = 2'-O-methylguanosine with a 3'-phosphorothioate linkage
  modified_base 22: mod_base = OTHER; note = 2'-O-methylcytidine with a 3'-phosphorothioate linkage
  modified_base 23: mod_base = OTHER; note = 2'-O-methyladenosine
tttcttcttctaaaactcgggca

SEQ ID NO: 2098 - RNA, 23 nt, synthetic construct
  source 1..23: mol_type = other RNA
  modified_base 1: mod_base = OTHER; note = 2'-O-methyluridine with a 3'-phosphorothioate linkage
  modified_base 2: mod_base = OTHER; note = 2'-fluoroadenosine with a 3'-phosphorothioate linkage
  modified_base 3: mod_base = OTHER; note = 2'-O-methyladenosine
  modified_base 4: mod_base = um
  modified_base 5: mod_base = OTHER; note = 2'-fluorocytidine
  modified_base 6: mod_base = OTHER; note = 2'-O-methyladenosine
  modified_base 7: mod_base = OTHER; note = 2'-fluorouridine
  modified_base 8: mod_base = cm
  modified_base 9: mod_base = um
  modified_base 10: mod_base = um
  modified_base 11: mod_base = gm
  modified_base 12: mod_base = OTHER; note = 2'-O-methyladenosine
  modified_base 13: mod_base = cm
  modified_base 14: mod_base = OTHER; note = 2'-fluorocytidine
  modified_base 15: mod_base = cm
  modified_base 16: mod_base = OTHER; note = 2'-fluorouridine
  modified_base 17: mod_base = cm
  modified_base 18: mod_base = um
  modified_base 19: mod_base = gm
  modified_base 20: mod_base = OTHER; note = 2'-O-methyladenosine
  modified_base 21: mod_base = OTHER; note = 2'-O-methylguanosine with a 3'-phosphorothioate linkage
  modified_base 22: mod_base = OTHER; note = 2'-O-methyluridine with a 3'-phosphorothioate linkage
  modified_base 23: mod_base = um
taatcatcttgaccctctgagtt

SEQ ID NO: 2099 - RNA, 23 nt, synthetic construct
  source 1..23: mol_type = other RNA
  modified_base 1: mod_base = OTHER; note = 2'-O-methyluridine with a 3'-phosphorothioate linkage
  modified_base 2: mod_base = OTHER; note = 2'-fluoroguanosine with a 3'-phosphorothioate linkage
  modified_base 3: mod_base = OTHER; note = 2'-O-methyladenosine
  modified_base 4: mod_base = gm
  modified_base 5: mod_base = OTHER; note = 2'-fluoroadenosine
  modified_base 6: mod_base = cm
  modified_base 7: mod_base = OTHER; note = 2'-fluoroadenosine
  modified_base 8: mod_base = um
  modified_base 9: mod_base = OTHER; note = 2'-O-methyladenosine
  modified_base 10: mod_base = OTHER; note = 2'-O-methyladenosine
  modified_base 11: mod_base = um
  modified_base 12: mod_base = cm
  modified_base 13: mod_base = OTHER; note = 2'-O-methyladenosine
  modified_base 14: mod_base = OTHER; note = 2'-fluorouridine
  modified_base 15: mod_base = cm
  modified_base 16: mod_base = OTHER; note = 2'-fluorouridine
  modified_base 17: mod_base = um
  modified_base 18: mod_base = gm
  modified_base 19: mod_base = OTHER; note = 2'-O-methyladenosine
  modified_base 20: mod_base = cm
  modified_base 21: mod_base = OTHER; note = 2'-O-methylcytidine with a 3'-phosphorothioate linkage
  modified_base 22: mod_base = OTHER; note = 2'-O-methylcytidine with a 3'-phosphorothioate linkage
  modified_base 23: mod_base = um
tgagacataatcatcttgaccct

SEQ ID NO: 2100 - RNA, 23 nt, synthetic construct
  source 1..23: mol_type = other RNA
  modified_base 1: mod_base = OTHER; note = 2'-O-methyluridine with a 3'-phosphorothioate linkage
  modified_base 2: mod_base = OTHER; note = 2'-fluoroadenosine with a 3'-phosphorothioate linkage
  modified_base 3: mod_base = gm
  modified_base 4: mod_base = OTHER; note = 2'-O-methyladenosine
  modified_base 5: mod_base = OTHER; note = 2'-fluoroguanosine
  modified_base 6: mod_base = OTHER; note = 2'-O-methyladenosine
  modified_base 7: mod_base = OTHER; note = 2'-fluorocytidine
  modified_base 8: mod_base = OTHER; note = 2'-O-methyladenosine
  modified_base 9: mod_base = um
  modified_base 10: mod_base = OTHER; note = 2'-O-methyladenosine
  modified_base 11: mod_base = OTHER; note = 2'-O-methyladenosine
  modified_base 12: mod_base = um
  modified_base 13: mod_base = cm
  modified_base 14: mod_base = OTHER; note = 2'-fluoroadenosine
  modified_base 15: mod_base = um
  modified_base 16: mod_base = OTHER; note = 2'-fluorocytidine
  modified_base 17: mod_base = um
  modified_base 18: mod_base = um
  modified_base 19: mod_base = gm
  modified_base 20: mod_base = OTHER; note = 2'-O-methyladenosine
  modified_base 21: mod_base = OTHER; note = 2'-O-methylcytidine with a 3'-phosphorothioate linkage
  modified_base 22: mod_base = OTHER; note = 2'-O-methylcytidine with a 3'-phosphorothioate linkage
  modified_base 23: mod_base = cm
tagagacataatcatcttgaccc

SEQ ID NO: 2101 - RNA, 23 nt, synthetic construct
  source 1..23: mol_type = other RNA
  modified_base 1: mod_base = OTHER; note = 2'-O-methyluridine with a 3'-phosphorothioate linkage
  modified_base 2: mod_base = OTHER; note = 2'-fluorocytidine with a 3'-phosphorothioate linkage
  modified_base 3: mod_base = um
  modified_base 4: mod_base = OTHER; note = 2'-O-methyladenosine
  modified_base 5: mod_base = OTHER; note = 2'-fluoroguanosine
  modified_base 6: mod_base = OTHER; note = 2'-O-methyladenosine
  modified_base 7: mod_base = OTHER; note = 2'-fluoroguanosine
  modified_base 8: mod_base = OTHER; note = 2'-O-methyladenosine
  modified_base 9: mod_base = cm
  modified_base 10: mod_base = OTHER; note = 2'-O-methyladenosine
  modified_base 11: mod_base = um
  modified_base 12: mod_base = OTHER; note = 2'-O-methyladenosine
  modified_base 13: mod_base = OTHER; note = 2'-O-methyladenosine
  modified_base 14: mod_base = OTHER; note = 2'-fluorouridine
  modified_base 15: mod_base = cm
  modified_base 16: mod_base = OTHER; note = 2'-fluoroadenosine
  modified_base 17: mod_base = um
  modified_base 18: mod_base = cm
  modified_base 19: mod_base = um
  modified_base 20: mod_base = um
  modified_base 21: mod_base = OTHER; note = 2'-O-methylguanosine with a 3'-phosphorothioate linkage
  modified_base 22: mod_base = OTHER; note = 2'-O-methyladenosine with a 3'-phosphorothioate linkage
  modified_base 23: mod_base = cm
tctagagacataatcatcttgac

SEQ ID NO: 2102 - RNA, 23 nt, synthetic construct
  source 1..23: mol_type = other RNA
  modified_base 1: mod_base = OTHER; note = 2'-O-methyluridine with a 3'-phosphorothioate linkage
  modified_base 2: mod_base = OTHER; note = 2'-fluorocytidine with a 3'-phosphorothioate linkage
  modified_base 3: mod_base = cm
  modified_base 4: mod_base = um
  modified_base 5: mod_base = OTHER; note = 2'-fluoroadenosine
  modified_base 6: mod_base = gm
  modified_base 7: mod_base = OTHER; note = 2'-fluoroadenosine
  modified_base 8: mod_base = gm
  modified_base 9: mod_base = OTHER; note = 2'-O-methyladenosine
  modified_base 10: mod_base = cm
  modified_base 11: mod_base = OTHER; note = 2'-O-methyladenosine
  modified_base 12: mod_base = um
  modified_base 13: mod_base = OTHER; note = 2'-O-methyladenosine
  modified_base 14: mod_base = OTHER; note = 2'-fluoroadenosine
  modified_base 15: mod_base = um
  modified_base 16: mod_base = OTHER; note = 2'-fluorocytidine
  modified_base 17: mod_base = OTHER; note = 2'-O-methyladenosine
  modified_base 18: mod_base = um
  modified_base 19: mod_base = cm
  modified_base 20: mod_base = um
  modified_base 21: mod_base = OTHER; note = 2'-O-methyluridine with a 3'-phosphorothioate linkage
  modified_base 22: mod_base = OTHER; note = 2'-O-methylguanosine with a 3'-phosphorothioate linkage
  modified_base 23: mod_base = OTHER; note = 2'-O-methyladenosine
tcctagagacataatcatcttga

SEQ ID NO: 2103 - RNA, 23 nt, synthetic construct
  source 1..23: mol_type = other RNA
  modified_base 1: mod_base = OTHER; note = 2'-O-methyluridine with a 3'-phosphorothioate linkage
  modified_base 2: mod_base = OTHER; note = 2'-fluoroguanosine with a 3'-phosphorothioate linkage
  modified_base 3: mod_base = cm
  modified_base 4: mod_base = cm
  modified_base 5: mod_base = OTHER; note = 2'-fluorouridine
  modified_base 6: mod_base = OTHER; note = 2'-O-methyladenosine
  modified_base 7: mod_base = OTHER; note = 2'-fluoroguanosine
  modified_base 8: mod_base = OTHER; note = 2'-O-methyladenosine
  modified_base 9: mod_base = gm
  modified_base 10: mod_base = OTHER; note = 2'-O-methyladenosine
  modified_base 11: mod_base = cm
  modified_base 12: mod_base = OTHER; note = 2'-O-methyladenosine
  modified_base 13: mod_base = um
  modified_base 14: mod_base = OTHER; note = 2'-fluoroadenosine
  modified_base 15: mod_base = OTHER; note = 2'-O-methyladenosine
  modified_base 16: mod_base = OTHER; note = 2'-fluorouridine
  modified_base 17: mod_base = cm
  modified_base 18: mod_base = OTHER; note = 2'-O-methyladenosine
  modified_base 19: mod_base = um
  modified_base 20: mod_base = cm
  modified_base 21: mod_base = OTHER; note = 2'-O-methyluridine with a 3'-phosphorothioate linkage
  modified_base 22: mod_base = OTHER; note = 2'-O-methyluridine with a 3'-phosphorothioate linkage
  modified_base 23: mod_base = gm
tgcctagagacataatcatcttg

SEQ ID NO: 2104 - RNA, 23 nt, synthetic construct
  source 1..23: mol_type = other RNA
  modified_base 1: mod_base = OTHER; note = 2'-O-methyluridine with a 3'-phosphorothioate linkage
  modified_base 2: mod_base = OTHER; note = 2'-fluoroadenosine with a 3'-phosphorothioate linkage
  modified_base 3: mod_base = gm
  modified_base 4: mod_base = cm
  modified_base 5: mod_base = OTHER; note = 2'-fluorocytidine
  modified_base 6: mod_base = um
  modified_base 7: mod_base = OTHER; note = 2'-fluoroadenosine
  modified_base 8: mod_base = gm
  modified_base 9: mod_base = OTHER; note = 2'-O-methyladenosine
  modified_base 10: mod_base = gm
  modified_base 11: mod_base = OTHER; note = 2'-O-methyladenosine
  modified_base 12: mod_base = cm
  modified_base 13: mod_base = OTHER; note = 2'-O-methyladenosine
  modified_base 14: mod_base = OTHER; note = 2'-fluorouridine
  modified_base 15: mod_base = OTHER; note = 2'-O-methyladenosine
  modified_base 16: mod_base = OTHER; note = 2'-fluoroadenosine
  modified_base 17: mod_base = um
  modified_base 18: mod_base = cm
  modified_base 19: mod_base = OTHER; note = 2'-O-methyladenosine
  modified_base 20: mod_base = um
  modified_base 21: mod_base = OTHER; note = 2'-O-methylcytidine with a 3'-phosphorothioate linkage
  modified_base 22: mod_base = OTHER; note = 2'-O-methyluridine with a 3'-phosphorothioate linkage
  modified_base 23: mod_base = um
tagcctagagacataatcatctt

SEQ ID NO: 2105 - RNA, 23 nt, synthetic construct
  source 1..23: mol_type = other RNA
  modified_base 1: mod_base = OTHER; note = 2'-O-methyluridine with a 3'-phosphorothioate linkage
  modified_base 2: mod_base = OTHER; note = 2'-fluoroadenosine with a 3'-phosphorothioate linkage
  modified_base 3: mod_base = OTHER; note = 2'-O-methyladenosine
  modified_base 4: mod_base = gm
  modified_base 5: mod_base = OTHER; note = 2'-fluorocytidine
  modified_base 6: mod_base = cm
  modified_base 7: mod_base = OTHER; note = 2'-fluorouridine
  modified_base 8: mod_base = OTHER; note = 2'-O-methyladenosine
  modified_base 9: mod_base = gm
  modified_base 10: mod_base = OTHER; note = 2'-O-methyladenosine
  modified_base 11: mod_base = gm
  modified_base 12: mod_base = OTHER; note = 2'-O-methyladenosine
  modified_base 13: mod_base = cm
  modified_base 14: mod_base = OTHER; note = 2'-fluoroadenosine
  modified_base 15: mod_base = um
  modified_base 16: mod_base = OTHER; note = 2'-fluoroadenosine
  modified_base 17: mod_base = OTHER; note = 2'-O-methyladenosine
  modified_base 18: mod_base = um
  modified_base 19: mod_base = cm
  modified_base 20: mod_base = OTHER; note = 2'-O-methyladenosine
  modified_base 21: mod_base = OTHER; note = 2'-O-methyluridine with a 3'-phosphorothioate linkage
  modified_base 22: mod_base = OTHER; note = 2'-O-methylcytidine with a 3'-phosphorothioate linkage
  modified_base 23: mod_base = um
taagcctagagacataatcatct

SEQ ID NO: 2106 - RNA, 23 nt, synthetic construct
  source 1..23: mol_type = other RNA
  modified_base 1: mod_base = OTHER; note = 2'-O-methyluridine with a 3'-phosphorothioate linkage
  modified_base 2: mod_base = OTHER; note = 2'-fluorocytidine with a 3'-phosphorothioate linkage
  modified_base 3: mod_base = OTHER; note = 2'-O-methyladenosine
  modified_base 4: mod_base = OTHER; note = 2'-O-methyladenosine
  modified_base 5: mod_base = OTHER; note = 2'-fluoroguanosine
  modified_base 6: mod_base = cm
  modified_base 7: mod_base = OTHER; note = 2'-fluorocytidine
  modified_base 8: mod_base = um
  modified_base 9: mod_base = OTHER; note = 2'-O-methyladenosine
  modified_base 10: mod_base = gm
  modified_base 11: mod_base = OTHER; note = 2'-O-methyladenosine
  modified_base 12: mod_base = gm
  modified_base 13: mod_base = OTHER; note = 2'-O-methyladenosine
  modified_base 14: mod_base = OTHER; note = 2'-fluorocytidine
  modified_base 15: mod_base = OTHER; note = 2'-O-methyladenosine
  modified_base 16: mod_base = OTHER; note = 2'-fluorouridine
  modified_base 17: mod_base = OTHER; note = 2'-O-methyladenosine
  modified_base 18: mod_base = OTHER; note = 2'-O-methyladenosine
  modified_base 19: mod_base = um
  modified_base 20: mod_base = cm
  modified_base 21: mod_base = OTHER; note = 2'-O-methyladenosine with a 3'-phosphorothioate linkage
  modified_base 22: mod_base = OTHER; note = 2'-O-methyluridine with a 3'-phosphorothioate linkage
  modified_base 23: mod_base = cm
tcaagcctagagacataatcatc

SEQ ID NO: 2107 - RNA, 23 nt, synthetic construct
  source 1..23: mol_type = other RNA
  modified_base 1: mod_base = OTHER; note = 2'-O-methyluridine with a 3'-phosphorothioate linkage
  modified_base 2: mod_base = OTHER; note = 2'-fluorouridine with a 3'-phosphorothioate linkage
  modified_base 3: mod_base = OTHER; note = 2'-O-methyladenosine
  modified_base 4: mod_base = um
  modified_base 5: mod_base = OTHER; note = 2'-fluorocytidine
  modified_base 6: mod_base = cm
  modified_base 7: mod_base = OTHER; note = 2'-fluoroadenosine
  modified_base 8: mod_base = gm
  modified_base 9: mod_base = cm
  modified_base 10: mod_base = gm
  modified_base 11: mod_base = OTHER; note = 2'-O-methyladenosine
  modified_base 12: mod_base = cm
  modified_base 13: mod_base = um
  modified_base 14: mod_base = OTHER; note = 2'-fluoroguanosine
  modified_base 15: mod_base = um
  modified_base 16: mod_base = OTHER; note = 2'-fluoroguanosine
  modified_base 17: mod_base = OTHER; note = 2'-O-methyladenosine
  modified_base 18: mod_base = gm
  modified_base 19: mod_base = cm
  modified_base 20: mod_base = OTHER; note = 2'-O-methyladenosine
  modified_base 21: mod_base = OTHER; note = 2'-O-methyluridine with a 3'-phosphorothioate linkage
  modified_base 22: mod_base = OTHER; note = 2'-O-methylguanosine with a 3'-phosphorothioate linkage
  modified_base 23: mod_base = OTHER; note = 2'-O-methyladenosine
ttatccagcgactgtgagcatga

SEQ ID NO: 2108 - RNA, 23 nt, synthetic construct
  source 1..23: mol_type = other RNA
  modified_base 1: mod_base = OTHER; note = 2'-O-methyluridine with a 3'-phosphorothioate linkage
  modified_base 2: mod_base = OTHER; note = 2'-fluorocytidine with a 3'-phosphorothioate linkage
  modified_base 3: mod_base = um
  modified_base 4: mod_base = OTHER; note = 2'-O-methyladenosine
  modified_base 5: mod_base = OTHER; note = 2'-fluorouridine
  modified_base 6: mod_base = cm
  modified_base 7: mod_base = OTHER; note = 2'-fluorocytidine
  modified_base 8: mod_base = OTHER; note = 2'-O-methyladenosine
  modified_base 9: mod_base = gm
  modified_base 10: mod_base = cm
  modified_base 11: mod_base = gm
  modified_base 12: mod_base = OTHER; note = 2'-O-methyladenosine
  modified_base 13: mod_base = cm
  modified_base 14: mod_base = OTHER; note = 2'-fluorouridine
  modified_base 15: mod_base = gm
  modified_base 16: mod_base = OTHER; note = 2'-fluorouridine
  modified_base 17: mod_base = gm
  modified_base 18: mod_base = OTHER; note = 2'-O-methyladenosine
  modified_base 19: mod_base = gm
  modified_base 20: mod_base = cm
  modified_base 21: mod_base = OTHER; note = 2'-O-methyladenosine with a 3'-phosphorothioate linkage
  modified_base 22: mod_base = OTHER; note = 2'-O-methyluridine with a 3'-phosphorothioate linkage
  modified_base 23: mod_base = gm
tctatccagcgactgtgagcatg

SEQ ID NO: 2109 - RNA, 23 nt, synthetic construct
  source 1..23: mol_type = other RNA
  modified_base 1: mod_base = OTHER; note = 2'-O-methyluridine with a 3'-phosphorothioate linkage
  modified_base 2: mod_base = OTHER; note = 2'-fluoroguanosine with a 3'-phosphorothioate linkage
  modified_base 3: mod_base = cm
  modified_base 4: mod_base = um
  modified_base 5: mod_base = OTHER; note = 2'-fluoroadenosine
  modified_base 6: mod_base = um
  modified_base 7: mod_base = OTHER; note = 2'-fluorocytidine
  modified_base 8: mod_base = cm
  modified_base 9: mod_base = OTHER; note = 2'-O-methyladenosine
  modified_base 10: mod_base = gm
  modified_base 11: mod_base = cm
  modified_base 12: mod_base = gm
  modified_base 13: mod_base = OTHER; note = 2'-O-methyladenosine
  modified_base 14: mod_base = OTHER; note = 2'-fluorocytidine
  modified_base 15: mod_base = um
  modified_base 16: mod_base = OTHER; note = 2'-fluoroguanosine
  modified_base 17: mod_base = um
  modified_base 18: mod_base = gm
  modified_base 19: mod_base = OTHER; note = 2'-O-methyladenosine
  modified_base 20: mod_base = gm
  modified_base 21: mod_base = OTHER; note = 2'-O-methylcytidine with a 3'-phosphorothioate linkage
  modified_base 22: mod_base = OTHER; note = 2'-O-methyladenosine with a 3'-phosphorothioate linkage
  modified_base 23: mod_base = um
tgctatccagcgactgtgagcat

SEQ ID NO: 2110 - RNA, 23 nt, synthetic construct
  source 1..23: mol_type = other RNA
  modified_base 1: mod_base = OTHER; note = 2'-O-methyluridine with a 3'-phosphorothioate linkage
  modified_base 2: mod_base = OTHER; note = 2'-fluoroadenosine with a 3'-phosphorothioate linkage
  modified_base 3: mod_base = gm
  modified_base 4: mod_base = cm
  modified_base 5: mod_base = OTHER; note = 2'-fluorouridine
  modified_base 6: mod_base = OTHER; note = 2'-O-methyladenosine
  modified_base 7: mod_base = OTHER; note = 2'-fluorouridine
  modified_base 8: mod_base = cm
  modified_base 9: mod_base = cm
  modified_base 10: mod_base = OTHER; note = 2'-O-methyladenosine
  modified_base 11: mod_base = gm
  modified_base 12: mod_base = cm
  modified_base 13: mod_base = gm
  modified_base 14: mod_base = OTHER; note = 2'-fluoroadenosine
  modified_base 15: mod_base = cm
  modified_base 16: mod_base = OTHER; note = 2'-fluorouridine
  modified_base 17: mod_base = gm
  modified_base 18: mod_base = um
  modified_base 19: mod_base = gm
  modified_base 20: mod_base = OTHER; note = 2'-O-methyladenosine
  modified_base 21: mod_base = OTHER; note = 2'-O-methylguanosine with a 3'-phosphorothioate linkage
  modified_base 22: mod_base = OTHER; note = 2'-O-methylcytidine with a 3'-phosphorothioate linkage
  modified_base 23: mod_base = OTHER; note = 2'-O-methyladenosine
tagctatccagcgactgtgagca

SEQ ID NO: 2111 - RNA, 23 nt, synthetic construct
  source 1..23: mol_type = other RNA
  modified_base 1: mod_base = OTHER; note = 2'-O-methyluridine with a 3'-phosphorothioate linkage
  modified_base 2: mod_base = OTHER; note = 2'-fluorocytidine with a 3'-phosphorothioate linkage
  modified_base 3: mod_base = OTHER; note = 2'-O-methyladenosine
  modified_base 4: mod_base = gm
  modified_base 5: mod_base = OTHER; note = 2'-fluorocytidine
  modified_base 6: mod_base = um
  modified_base 7: mod_base = OTHER; note = 2'-fluoroadenosine
  modified_base 8: mod_base = um
  modified_base 9: mod_base = cm
  modified_base 10: mod_base = cm
  modified_base 11: mod_base = OTHER; note = 2'-O-methyladenosine
  modified_base 12: mod_base = gm
  modified_base 13: mod_base = cm
  modified_base 14: mod_base = OTHER; note = 2'-fluoroguanosine
  modified_base 15: mod_base = OTHER; note = 2'-O-methyladenosine
  modified_base 16: mod_base = OTHER; note = 2'-fluorocytidine
  modified_base 17: mod_base = um
  modified_base 18: mod_base = gm
  modified_base 19: mod_base = um
  modified_base 20: mod_base = gm
  modified_base 21: mod_base = OTHER; note = 2'-O-methyladenosine with a 3'-phosphorothioate linkage
  modified_base 22: mod_base = OTHER; note = 2'-O-methylguanosine with a 3'-phosphorothioate linkage
  modified_base 23: mod_base = cm
tcagctatccagcgactgtgagc

SEQ ID NO: 2112 - RNA, 23 nt, synthetic construct
  source 1..23: mol_type = other RNA
  modified_base 1: mod_base = OTHER; note = 2'-O-methyluridine with a 3'-phosphorothioate linkage
  modified_base 2: mod_base = OTHER; note = 2'-fluorouridine with a 3'-phosphorothioate linkage
  modified_base 3: mod_base = cm
  modified_base 4: mod_base = OTHER; note = 2'-O-methyladenosine
  modified_base 5: mod_base = OTHER; note = 2'-fluoroguanosine
  modified_base 6: mod_base = cm
  modified_base 7: mod_base = OTHER; note = 2'-fluorouridine
  modified_base 8: mod_base = OTHER; note = 2'-O-methyladenosine
  modified_base 9: mod_base = um
  modified_base 10: mod_base = cm
  modified_base 11: mod_base = cm
  modified_base 12: mod_base = OTHER; note = 2'-O-methyladenosine
  modified_base 13: mod_base = gm
  modified_base 14: mod_base = OTHER; note = 2'-fluorocytidine
  modified_base 15: mod_base = gm
  modified_base 16: mod_base = OTHER; note = 2'-fluoroadenosine
  modified_base 17: mod_base = cm
  modified_base 18: mod_base = um
  modified_base 19: mod_base = gm
  modified_base 20: mod_base = um
  modified_base 21: mod_base = OTHER; note = 2'-O-methylguanosine with a 3'-phosphorothioate linkage
  modified_base 22: mod_base = OTHER; note = 2'-O-methyladenosine with a 3'-phosphorothioate linkage
  modified_base 23: mod_base = gm
ttcagctatccagcgactgtgag

SEQ ID NO: 2113 - RNA, 23 nt, synthetic construct
  source 1..23: mol_type = other RNA
  modified_base 1: mod_base = OTHER; note = 2'-O-methyluridine with a 3'-phosphorothioate linkage
  modified_base 2: mod_base = OTHER; note = 2'-fluoroguanosine with a 3'-phosphorothioate linkage
  modified_base 3: mod_base = gm
  modified_base 4: mod_base = OTHER; note = 2'-O-methyladenosine
  modified_base 5: mod_base = OTHER; note = 2'-fluoroadenosine
  modified_base 6: mod_base = OTHER; note = 2'-O-methyladenosine
  modified_base 7: mod_base = OTHER; note = 2'-fluorocytidine
  modified_base 8: mod_base = OTHER; note = 2'-O-methyladenosine
  modified_base 9: mod_base = cm
  modified_base 10: mod_base = um
  modified_base 11: mod_base = um
  modified_base 12: mod_base = gm
  modified_base 13: mod_base = gm
  modified_base 14: mod_base = OTHER; note = 2'-fluorouridine
  modified_base 15: mod_base = um
  modified_base 16: mod_base = OTHER; note = 2'-fluorocytidine
  modified_base 17: mod_base = OTHER; note = 2'-O-methyladenosine
  modified_base 18: mod_base = OTHER; note = 2'-O-methyladenosine
  modified_base 19: mod_base = um
  modified_base 20: mod_base = um
  modified_base 21: mod_base = OTHER; note = 2'-O-methylcytidine with a 3'-phosphorothioate linkage
  modified_base 22: mod_base = OTHER; note = 2'-O-methyluridine with a 3'-phosphorothioate linkage
  modified_base 23: mod_base = cm
tggaaacacttggttcaattctc

SEQ ID NO: 2114 - RNA, 23 nt, synthetic construct
  source 1..23: mol_type = other RNA
  modified_base 1: mod_base = OTHER; note = 2'-O-methyluridine with a 3'-phosphorothioate linkage
  modified_base 2: mod_base = OTHER; note = 2'-fluorocytidine with a 3'-phosphorothioate linkage
  modified_base 3: mod_base = OTHER; note = 2'-O-methyladenosine
  modified_base 4: mod_base = gm
  modified_base 5: mod_base = OTHER; note = 2'-fluoroadenosine
  modified_base 6: mod_base = gm
  modified_base 7: mod_base = OTHER; note = 2'-fluoroguanosine
  modified_base 8: mod_base = gm
  modified_base 9: mod_base = OTHER; note = 2'-O-methyladenosine
  modified_base 10: mod_base = OTHER; note = 2'-O-methyladenosine
  modified_base 11: mod_base = OTHER; note = 2'-O-methyladenosine
  modified_base 12: mod_base = cm
  modified_base 13: mod_base = OTHER; note = 2'-O-methyladenosine
  modified_base 14: mod_base = OTHER; note = 2'-fluorocytidine
  modified_base 15: mod_base = um
  modified_base 16: mod_base = OTHER; note = 2'-fluorouridine
  modified_base 17: mod_base = gm
  modified_base 18: mod_base = gm
  modified_base 19: mod_base = um
  modified_base 20: mod_base = um
  modified_base 21: mod_base = OTHER; note = 2'-O-methylcytidine with a 3'-phosphorothioate linkage
  modified_base 22: mod_base = OTHER; note = 2'-O-methyladenosine with a 3'-phosphorothioate linkage
  modified_base 23: mod_base = OTHER; note = 2'-O-methyladenosine
tcagagggaaacacttggttcaa

SEQ ID NO: 2115 - RNA, 23 nt, synthetic construct
  source 1..23: mol_type = other RNA
  modified_base 1: mod_base = OTHER; note = 2'-O-methyluridine with a 3'-phosphorothioate linkage
  modified_base 2: mod_base = OTHER; note = 2'-fluoroadenosine with a 3'-phosphorothioate linkage
  modified_base 3: mod_base = OTHER; note = 2'-O-methyladenosine
  modified_base 4: mod_base = um
  modified_base 5: mod_base = OTHER; note = 2'-fluoroadenosine
  modified_base 6: mod_base = um
  modified_base 7: mod_base = OTHER; note = 2'-fluorocytidine
  modified_base 8: mod_base = cm
  modified_base 9: mod_base = OTHER; note = 2'-O-methyladenosine
  modified_base 10: mod_base = um
  modified_base 11: mod_base = gm
  modified_base 12: mod_base = cm
  modified_base 13: mod_base = um
  modified_base 14: mod_base = OTHER; note = 2'-fluoroguanosine
  modified_base 15: mod_base = OTHER; note = 2'-O-methyladenosine
  modified_base 16: mod_base = OTHER; note = 2'-fluorouridine
  modified_base 17: mod_base = cm
  modified_base 18: mod_base = OTHER; note = 2'-O-methyladenosine
  modified_base 19: mod_base = um
  modified_base 20: mod_base = um
  modified_base 21: mod_base = OTHER; note = 2'-O-methyluridine with a 3'-phosphorothioate linkage
  modified_base 22: mod_base = OTHER; note = 2'-O-methyluridine with a 3'-phosphorothioate linkage
  modified_base 23: mod_base = OTHER; note = 2'-O-methyladenosine
taatatccatgctgatcatttta

SEQ ID NO: 2116 - RNA, 23 nt, synthetic construct
  source 1..23: mol_type = other RNA
  modified_base 1: mod_base = OTHER; note = 2'-O-methyluridine with a 3'-phosphorothioate linkage
  modified_base 2: mod_base = OTHER; note = 2'-fluorouridine with a 3'-phosphorothioate linkage
  modified_base 3: mod_base = cm
  modified_base 4: mod_base = OTHER; note = 2'-O-methyladenosine
  modified_base 5: mod_base = OTHER; note = 2'-fluoroadenosine
  modified_base 6: mod_base = um
  modified_base 7: mod_base = OTHER; note = 2'-fluoroadenosine
  modified_base 8: mod_base = um
  modified_base 9: mod_base = cm
  modified_base 10: mod_base = cm
  modified_base 11: mod_base = OTHER; note = 2'-O-methyladenosine
  modified_base 12: mod_base = um
  modified_base 13: mod_base = gm
  modified_base 14: mod_base = OTHER; note = 2'-fluorocytidine
  modified_base 15: mod_base = um
  modified_base 16: mod_base = OTHER; note = 2'-fluoroguanosine
  modified_base 17: mod_base = OTHER; note = 2'-O-methyladenosine
  modified_base 18: mod_base = um
  modified_base 19: mod_base = cm
  modified_base 20: mod_base = OTHER; note = 2'-O-methyladenosine
  modified_base 21: mod_base = OTHER; note = 2'-O-methyluridine with a 3'-phosphorothioate linkage
  modified_base 22: mod_base = OTHER; note = 2'-O-methyluridine with a 3'-phosphorothioate linkage
  modified_base 23: mod_base = um
ttcaatatccatgctgatcattt

SEQ ID NO: 2117 - RNA, 23 nt, synthetic construct
  source 1..23: mol_type = other RNA
  modified_base 1: mod_base = OTHER; note = 2'-O-methyluridine with a 3'-phosphorothioate linkage
  modified_base 2: mod_base = OTHER; note = 2'-fluoroadenosine with a 3'-phosphorothioate linkage
  modified_base 3: mod_base = cm
  modified_base 4: mod_base = um
  modified_base 5: mod_base = OTHER; note = 2'-fluorouridine
  modified_base 6: mod_base = gm
  modified_base 7: mod_base = OTHER; note = 2'-fluoroadenosine
  modified_base 8: mod_base = cm
  modified_base 9: mod_base = OTHER; note = 2'-O-methyladenosine
  modified_base 10: mod_base = gm
  modified_base 11: mod_base = cm
  modified_base 12: mod_base = cm
  modified_base 13: mod_base = OTHER; note = 2'-O-methyladenosine
  modified_base 14: mod_base = OTHER; note = 2'-fluoroguanosine
  modified_base 15: mod_base = OTHER; note = 2'-O-methyladenosine
  modified_base 16: mod_base = OTHER; note = 2'-fluoroadenosine
  modified_base 17: mod_base = gm
  modified_base 18: mod_base = gm
  modified_base 19: mod_base = OTHER; note = 2'-O-methyladenosine
  modified_base 20: mod_base = gm
  modified_base 21: mod_base = OTHER; note = 2'-O-methyladenosine with a 3'-phosphorothioate linkage
  modified_base 22: mod_base = OTHER; note = 2'-O-methylguanosine with a 3'-phosphorothioate linkage
  modified_base 23: mod_base = cm
tacttgacagccagaaggagagc

SEQ ID NO: 2118 - RNA, 23 nt, synthetic construct
  source 1..23: mol_type = other RNA
  modified_base 1: mod_base = OTHER; note = 2'-O-methyluridine with a 3'-phosphorothioate linkage
  modified_base 2: mod_base = OTHER; note = 2'-fluorouridine with a 3'-phosphorothioate linkage
  modified_base 3: mod_base = OTHER; note = 2'-O-methyladenosine
  modified_base 4: mod_base = cm
  modified_base 5: mod_base = OTHER; note = 2'-fluorouridine
  modified_base 6: mod_base = um
  modified_base 7: mod_base = OTHER; note = 2'-fluoroguanosine
  modified_base 8: mod_base = OTHER; note = 2'-O-methyladenosine
  modified_base 9: mod_base = cm
  modified_base 10: mod_base = OTHER; note = 2'-O-methyladenosine
  modified_base 11: mod_base = gm
  modified_base 12: mod_base = cm
  modified_base 13: mod_base = cm
  modified_base 14: mod_base = OTHER; note = 2'-fluoroadenosine
  modified_base 15: mod_base = gm
  modified_base 16: mod_base = OTHER; note = 2'-fluoroadenosine
  modified_base 17: mod_base = OTHER; note = 2'-O-methyladenosine
  modified_base 18: mod_base = gm
  modified_base 19: mod_base = gm
  modified_base 20: mod_base = OTHER; note = 2'-O-methyladenosine
  modified_base 21: mod_base = OTHER; note = 2'-O-methylguanosine with a 3'-phosphorothioate linkage
  modified_base 22: mod_base = OTHER; note = 2'-O-methyladenosine with a 3'-phosphorothioate linkage
  modified_base 23: mod_base = gm
ttacttgacagccagaaggagag

SEQ ID NO: 2119 - RNA, 23 nt, synthetic construct
  source 1..23: mol_type = other RNA
  modified_base 1: mod_base = OTHER; note = 2'-O-methyluridine with a 3'-phosphorothioate linkage
  modified_base 2: mod_base = OTHER; note = 2'-fluoroguanosine with a 3'-phosphorothioate linkage
  modified_base 3: mod_base = um
  modified_base 4: mod_base = gm
  modified_base 5: mod_base = OTHER; note = 2'-fluorouridine
  modified_base 6: mod_base = OTHER; note = 2'-O-methyladenosine
  modified_base 7: mod_base = OTHER; note = 2'-fluoroguanosine
  modified_base 8: mod_base = OTHER; note = 2'-O-methyladenosine
  modified_base 9: mod_base = um
  modified_base 10: mod_base = um
  modified_base 11: mod_base = cm
  modified_base 12: mod_base = um
  modified_base 13: mod_base = gm
  modified_base 14: mod_base = OTHER; note = 2'-fluorouridine
  modified_base 15: mod_base = cm
  modified_base 16: mod_base = OTHER; note = 2'-fluorouridine
  modified_base 17: mod_base = cm
  modified_base 18: mod_base = um
  modified_base 19: mod_base = gm
  modified_base 20: mod_base = um
  modified_base 21: mod_base = OTHER; note = 2'-O-methyluridine with a 3'-phosphorothioate linkage
  modified_base 22: mod_base = OTHER; note = 2'-O-methyluridine with a 3'-phosphorothioate linkage
  modified_base 23: mod_base = gm
tgtgtagattctgtctctgtttg

SEQ ID NO: 2120 - RNA, 23 nt, synthetic construct
  source 1..23: mol_type = other RNA
  modified_base 1: mod_base = OTHER; note = 2'-O-methyluridine with a 3'-phosphorothioate linkage
  modified_base 2: mod_base = OTHER; note = 2'-fluoroadenosine with a 3'-phosphorothioate linkage
  modified_base 3: mod_base = gm
  modified_base 4: mod_base = um
  modified_base 5: mod_base = OTHER; note = 2'-fluoroguanosine
  modified_base 6: mod_base = um
  modified_base 7: mod_base = OTHER; note = 2'-fluoroadenosine
  modified_base 8: mod_base = gm
  modified_base 9: mod_base = OTHER; note = 2'-O-methyladenosine
  modified_base 10: mod_base = um
  modified_base 11: mod_base = um
  modified_base 12: mod_base = cm
  modified_base 13: mod_base = um
  modified_base 14: mod_base = OTHER; note = 2'-fluoroguanosine
  modified_base 15: mod_base = um
  modified_base 16: mod_base = OTHER; note = 2'-fluorocytidine
  modified_base 17: mod_base = um
  modified_base 18: mod_base = cm
  modified_base 19: mod_base = um
  modified_base 20: mod_base = gm
  modified_base 21: mod_base = OTHER; note = 2'-O-methyluridine with a 3'-phosphorothioate linkage
  modified_base 22: mod_base = OTHER; note = 2'-O-methyluridine with a 3'-phosphorothioate linkage
  modified_base 23: mod_base = um
tagtgtagattctgtctctgttt

SEQ ID NO: 2121 - RNA, 23 nt, synthetic construct
  source 1..23: mol_type = other RNA
  modified_base 1: mod_base = OTHER; note = 2'-O-methyluridine with a 3'-phosphorothioate linkage
  modified_base 2: mod_base = OTHER; note = 2'-fluoroadenosine with a 3'-phosphorothioate linkage
  modified_base 3: mod_base = gm
  modified_base 4: mod_base = gm
  modified_base 5: mod_base = OTHER; note = 2'-fluorouridine
  modified_base 6: mod_base = um
  modified_base 7: mod_base = OTHER; note = 2'-fluorocytidine
  modified_base 8: mod_base = OTHER; note = 2'-O-methyladenosine
  modified_base 9: mod_base = cm
  modified_base 10: mod_base = gm
  modified_base 11: mod_base = um
  modified_base 12: mod_base = cm
  modified_base 13: mod_base = um
  modified_base 14: mod_base = OTHER; note = 2'-fluoroadenosine
  modified_base 15: mod_base = cm
  modified_base 16: mod_base = OTHER; note = 2'-fluoroadenosine
  modified_base 17: mod_base = OTHER; note = 2'-O-methyladenosine
  modified_base 18: mod_base = cm
  modified_base 19: mod_base = OTHER; note = 2'-O-methyladenosine
  modified_base 20: mod_base = OTHER; note = 2'-O-methyladenosine
  modified_base 21: mod_base = OTHER; note = 2'-O-methyluridine with a 3'-phosphorothioate linkage
  modified_base 22: mod_base = OTHER; note = 2'-O-methyluridine with a 3'-phosphorothioate linkage
  modified_base 23: mod_base = gm
taggttcacgtctacaacaattg

SEQ ID NO: 2122 - RNA, 23 nt, synthetic construct
  source 1..23: mol_type = other RNA
  modified_base 1: mod_base = OTHER; note = 2'-O-methyluridine with a 3'-phosphorothioate linkage
  modified_base 2: mod_base = OTHER; note = 2'-fluoroguanosine with a 3'-phosphorothioate linkage
  modified_base 3: mod_base = gm
  modified_base 4: mod_base = gm
  modified_base 5: mod_base = OTHER; note = 2'-fluorouridine
  modified_base 6: mod_base = um
  modified_base 7: mod_base = OTHER; note = 2'-fluorouridine
  modified_base 8: mod_base = um
  modified_base 9: mod_base = OTHER; note = 2'-O-methyladenosine
  modified_base 10: mod_base = um
  modified_base 11: mod_base = OTHER; note = 2'-O-methyladenosine
  modified_base 12: mod_base = OTHER; note = 2'-O-methyladenosine
  modified_base 13: mod_base = cm
  modified_base 14: mod_base = OTHER; note = 2'-fluorocytidine
  modified_base 15: mod_base = um
  modified_base 16: mod_base = OTHER; note = 2'-fluorocytidine
  modified_base 17: mod_base = OTHER; note = 2'-O-methyladenosine
  modified_base 18: mod_base = OTHER; note = 2'-O-methyladenosine
  modified_base 19: mod_base = cm
  modified_base 20: mod_base = um
  modified_base 21: mod_base = OTHER; note = 2'-O-methyluridine with a 3'-phosphorothioate linkage
  modified_base 22: mod_base = OTHER; note = 2'-O-methyluridine with a 3'-phosphorothioate linkage
  modified_base 23: mod_base = um
tgggttttataacctcaactttt

SEQ ID NO: 2123 - RNA, 23 nt, synthetic construct
  source 1..23: mol_type = other RNA
  modified_base 1: mod_base = OTHER; note = 2'-O-methyluridine with a 3'-phosphorothioate linkage
  modified_base 2: mod_base = OTHER; note = 2'-fluoroadenosine with a 3'-phosphorothioate linkage
  modified_base 3: mod_base = OTHER; note = 2'-O-methyladenosine
  modified_base 4: mod_base = gm
  modified_base 5: mod_base = OTHER; note = 2'-fluoroguanosine
  modified_base 6: mod_base = gm
  modified_base 7: mod_base = OTHER; note = 2'-fluorouridine
  modified_base 8: mod_base = um
  modified_base 9: mod_base = um
  modified_base 10: mod_base = um
  modified_base 11: mod_base = OTHER; note = 2'-O-methyladenosine
  modified_base 12: mod_base = um
  modified_base 13: mod_base = OTHER; note = 2'-O-methyladenosine
  modified_base 14: mod_base = OTHER; note = 2'-fluoroadenosine
  modified_base 15: mod_base = cm
  modified_base 16: mod_base = OTHER; note = 2'-fluorocytidine
  modified_base 17: mod_base = um
  modified_base 18: mod_base = cm
  modified_base 19: mod_base = OTHER; note = 2'-O-methyladenosine
  modified_base 20: mod_base = OTHER; note = 2'-O-methyladenosine
  modified_base 21: mod_base = OTHER; note = 2'-O-methylcytidine with a 3'-phosphorothioate linkage
  modified_base 22: mod_base = OTHER; note = 2'-O-methyluridine with a 3'-phosphorothioate linkage
  modified_base 23: mod_base = um
taagggttttataacctcaactt

SEQ ID NO: 2124 - RNA, 23 nt, synthetic construct
  source 1..23: mol_type = other RNA
  modified_base 1: mod_base = OTHER; note = 2'-O-methyluridine with a 3'-phosphorothioate linkage
  modified_base 2: mod_base = OTHER; note = 2'-fluorouridine with a 3'-phosphorothioate linkage
  modified_base 3: mod_base = OTHER; note = 2'-O-methyladenosine
  modified_base 4: mod_base = OTHER; note = 2'-O-methyladenosine
  modified_base 5: mod_base = OTHER; note = 2'-fluoroguanosine
  modified_base 6: mod_base = gm
  modified_base 7: mod_base = OTHER; note = 2'-fluoroguanosine
  modified_base 8: mod_base = um
  modified_base 9: mod_base = um
  modified_base 10: mod_base = um
  modified_base 11: mod_base = um
  modified_base 12: mod_base = OTHER; note = 2'-O-methyladenosine
  modified_base 13: mod_base = um
  modified_base 14: mod_base = OTHER; note = 2'-fluoroadenosine
  modified_base 15: mod_base = OTHER; note = 2'-O-methyladenosine
  modified_base 16: mod_base = OTHER; note = 2'-fluorocytidine
  modified_base 17: mod_base = cm
  modified_base 18: mod_base = um
  modified_base 19: mod_base = cm
  modified_base 20: mod_base = OTHER; note = 2'-O-methyladenosine
  modified_base 21: mod_base = OTHER; note = 2'-O-methyladenosine with a 3'-phosphorothioate linkage
  modified_base 22: mod_base = OTHER; note = 2'-O-methylcytidine with a 3'-phosphorothioate linkage
  modified_base 23: mod_base = um
ttaagggttttataacctcaact

SEQ ID NO: 2125 - RNA, 23 nt, synthetic construct
  source 1..23: mol_type = other RNA
  modified_base 1: mod_base = OTHER; note = 2'-O-methyluridine with a 3'-phosphorothioate linkage
  modified_base 2: mod_base = OTHER; note = 2'-fluorocytidine with a 3'-phosphorothioate linkage
  modified_base 3: mod_base = um
  modified_base 4: mod_base = OTHER; note = 2'-O-methyladenosine
  modified_base 5: mod_base = OTHER; note = 2'-fluoroadenosine
  modified_base 6: mod_base = gm
  modified_base 7: mod_base = OTHER; note = 2'-fluoroguanosine
  modified_base 8: mod_base = gm
  modified_base 9: mod_base = um
  modified_base 10: mod_base = um
  modified_base 11: mod_base = um
  modified_base 12: mod_base = um
  modified_base 13: mod_base = OTHER; note = 2'-O-methyladenosine
  modified_base 14: mod_base = OTHER; note = 2'-fluorouridine
  modified_base 15: mod_base = OTHER; note = 2'-O-methyladenosine
  modified_base 16: mod_base = OTHER; note = 2'-fluoroadenosine
  modified_base 17: mod_base = cm
  modified_base 18: mod_base = cm
  modified_base 19: mod_base = um
  modified_base 20: mod_base = cm
  modified_base 21: mod_base = OTHER; note = 2'-O-methyladenosine with a 3'-phosphorothioate linkage
  modified_base 22: mod_base = OTHER; note = 2'-O-methyladenosine with a 3'-phosphorothioate linkage
  modified_base 23: mod_base = cm
tctaagggttttataacctcaac

SEQ ID NO: 2126 - RNA, 23 nt, synthetic construct
  source 1..23: mol_type = other RNA
  modified_base 1: mod_base = OTHER; note = 2'-O-methyluridine with a 3'-phosphorothioate linkage
  modified_base 2: mod_base = OTHER; note = 2'-fluoroadenosine with a 3'-phosphorothioate linkage
  modified_base 3: mod_base = OTHER; note = 2'-O-methyladenosine
  modified_base 4: mod_base = um
  modified_base 5: mod_base = OTHER; note = 2'-fluorouridine
  modified_base 6: mod_base = um
  modified_base 7: mod_base = OTHER; note = 2'-fluorouridine
  modified_base 8: mod_base = gm
  modified_base 9: mod_base = cm
  modified_base 10: mod_base = OTHER; note = 2'-O-methyladenosine
  modified_base 11: mod_base = cm
  modified_base 12: mod_base = cm
  modified_base 13: mod_base = um
  modified_base 14: mod_base = OTHER; note = 2'-fluorouridine
  modified_base 15: mod_base = um
  modified_base 16: mod_base = OTHER; note = 2'-fluorocytidine
  modified_base 17: mod_base = um
  modified_base 18: mod_base = cm
  modified_base 19: mod_base = um
  modified_base 20: mod_base = gm
  modified_base 21: mod_base = OTHER; note = 2'-O-methylcytidine with a 3'-phosphorothioate linkage
  modified_base 22: mod_base = OTHER; note = 2'-O-methyladenosine with a 3'-phosphorothioate linkage
  modified_base 23: mod_base = um
taattttgcacctttctctgcat

SEQ ID NO: 2127 - RNA, 23 nt, synthetic construct
  source 1..23: mol_type = other RNA
  modified_base 1: mod_base = OTHER; note = 2'-O-methyluridine with a 3'-phosphorothioate linkage
  modified_base 2: mod_base = OTHER; note = 2'-fluoroguanosine with a 3'-phosphorothioate linkage
  modified_base 3: mod_base = OTHER; note = 2'-O-methyladenosine
  modified_base 4: mod_base = OTHER; note = 2'-O-methyladenosine
  modified_base 5: mod_base = OTHER; note = 2'-fluorouridine
  modified_base 6: mod_base = um
  modified_base 7: mod_base = OTHER; note = 2'-fluorouridine
  modified_base 8: mod_base = um
  modified_base 9: mod_base = gm
  modified_base 10: mod_base = cm
  modified_base 11: mod_base = OTHER; note = 2'-O-methyladenosine
  modified_base 12: mod_base = cm
  modified_base 13: mod_base = cm
  modified_base 14: mod_base = OTHER; note = 2'-fluorouridine
  modified_base 15: mod_base = um
  modified_base 16: mod_base = OTHER; note = 2'-fluorouridine
  modified_base 17: mod_base = cm
  modified_base 18: mod_base = um
  modified_base 19: mod_base = cm
  modified_base 20: mod_base = um
  modified_base 21: mod_base = OTHER; note = 2'-O-methylguanosine with a 3'-phosphorothioate linkage
  modified_base 22: mod_base = OTHER; note = 2'-O-methylcytidine with a 3'-phosphorothioate linkage
  modified_base 23: mod_base = OTHER; note = 2'-O-methyladenosine
tgaattttgcacctttctctgca

SEQ ID NO: 2128 - RNA, 23 nt, synthetic construct
  source 1..23: mol_type = other RNA
  modified_base 1: mod_base = OTHER; note = 2'-O-methyluridine with a 3'-phosphorothioate linkage
  modified_base 2: mod_base = OTHER; note = 2'-fluoroguanosine with a 3'-phosphorothioate linkage
  modified_base 3: mod_base = gm
  modified_base 4: mod_base = OTHER; note = 2'-O-methyladenosine
  modified_base 5: mod_base = OTHER; note = 2'-fluoroadenosine
  modified_base 6: mod_base = um
  modified_base 7: mod_base = OTHER; note = 2'-fluorouridine
  modified_base 8: mod_base = um
  modified_base 9: mod_base = um
  modified_base 10: mod_base = gm
  modified_base 11: mod_base = cm
  modified_base 12: mod_base = OTHER; note = 2'-O-methyladenosine
  modified_base 13: mod_base = cm
  modified_base 14: mod_base = OTHER; note = 2'-fluorocytidine
  modified_base 15: mod_base = um
  modified_base 16: mod_base = OTHER; note = 2'-fluorouridine
  modified_base 17: mod_base = um
  modified_base 18: mod_base = cm
  modified_base 19: mod_base = um
  modified_base 20: mod_base = cm
  modified_base 21: mod_base = OTHER; note = 2'-O-methyluridine with a 3'-phosphorothioate linkage
  modified_base 22: mod_base = OTHER; note = 2'-O-methylguanosine with a 3'-phosphorothioate linkage
  modified_base 23: mod_base = cm
tggaattttgcacctttctctgc

SEQ ID NO: 2129 - RNA, 23 nt, synthetic construct
  source 1..23: mol_type = other RNA
  modified_base 1: mod_base = OTHER; note = 2'-O-methyluridine with a 3'-phosphorothioate linkage
  modified_base 2: mod_base = OTHER; note = 2'-fluoroadenosine with a 3'-phosphorothioate linkage
  modified_base 3: mod_base = gm
  modified_base 4: mod_base = gm
  modified_base 5: mod_base = OTHER; note = 2'-fluoroadenosine
  modified_base 6: mod_base = OTHER; note = 2'-O-methyladenosine
  modified_base 7: mod_base = OTHER; note = 2'-fluorouridine
  modified_base 8: mod_base = um
  modified_base 9: mod_base = um
  modified_base 10: mod_base = um
  modified_base 11: mod_base = gm
  modified_base 12: mod_base = cm
  modified_base 13: mod_base = OTHER; note = 2'-O-methyladenosine
  modified_base 14: mod_base = OTHER; note = 2'-fluorocytidine
  modified_base 15: mod_base = cm
  modified_base 16: mod_base = OTHER; note = 2'-fluorouridine
  modified_base 17: mod_base = um
  modified_base 18: mod_base = um
  modified_base 19: mod_base = cm
  modified_base 20: mod_base = um
  modified_base 21: mod_base = OTHER; note = 2'-O-methylcytidine with a 3'-phosphorothioate linkage
  modified_base 22: mod_base = OTHER; note = 2'-O-methyluridine with a 3'-phosphorothioate linkage
  modified_base 23: mod_base = gm
taggaattttgcacctttctctg

SEQ ID NO: 2130 - RNA, 23 nt, synthetic construct
  source 1..23: mol_type = other RNA
  modified_base 1: mod_base = OTHER; note = 2'-O-methyluridine with a 3'-phosphorothioate linkage
  modified_base 2: mod_base = OTHER; note = 2'-fluoroadenosine with a 3'-phosphorothioate linkage
  modified_base 3: mod_base = OTHER; note = 2'-O-methyladenosine
  modified_base 4: mod_base = gm
  modified_base 5: mod_base = OTHER; note = 2'-fluoroguanosine
  modified_base 6: mod_base = OTHER; note = 2'-O-methyladenosine
  modified_base 7: mod_base = OTHER; note = 2'-fluoroadenosine
  modified_base 8: mod_base = um
  modified_base 9: mod_base = um
  modified_base 10: mod_base = um
  modified_base 11: mod_base = um
  modified_base 12: mod_base = gm
  modified_base 13: mod_base = cm
  modified_base 14: mod_base = OTHER; note = 2'-fluoroadenosine
  modified_base 15: mod_base = cm
  modified_base 16: mod_base = OTHER; note = 2'-fluorocytidine
  modified_base 17: mod_base = um
  modified_base 18: mod_base = um
  modified_base 19: mod_base = um
  modified_base 20: mod_base = cm
  modified_base 21: mod_base = OTHER; note = 2'-O-methyluridine with a 3'-phosphorothioate linkage
  modified_base 22: mod_base = OTHER; note = 2'-O-methylcytidine with a 3'-phosphorothioate linkage
  modified_base 23: mod_base = um
taaggaattttgcacctttctct

SEQ ID NO: 2131 - RNA, 23 nt, synthetic construct
  source 1..23: mol_type = other RNA
  modified_base 1: mod_base = OTHER; note = 2'-O-methyluridine with a 3'-phosphorothioate linkage
  modified_base 2: mod_base = OTHER; note = 2'-fluorouridine with a 3'-phosphorothioate linkage
  modified_base 3: mod_base = OTHER; note = 2'-O-methyladenosine
  modified_base 4: mod_base = OTHER; note = 2'-O-methyladenosine
  modified_base 5: mod_base = OTHER; note = 2'-fluoroguanosine
  modified_base 6: mod_base = gm
  modified_base 7: mod_base = OTHER; note = 2'-fluoroadenosine
  modified_base 8: mod_base = OTHER; note = 2'-O-methyladenosine
  modified_base 9: mod_base = um
  modified_base 10: mod_base = um
  modified_base 11: mod_base = um
  modified_base 12: mod_base = um
  modified_base 13: mod_base = gm
  modified_base 14: mod_base = OTHER; note = 2'-fluorocytidine
  modified_base 15: mod_base = OTHER; note = 2'-O-methyladenosine
  modified_base 16: mod_base = OTHER; note = 2'-fluorocytidine
  modified_base 17: mod_base = cm
  modified_base 18: mod_base = um
  modified_base 19: mod_base = um
  modified_base 20: mod_base = um
  modified_base 21: mod_base = OTHER; note = 2'-O-methylcytidine with a 3'-phosphorothioate linkage
  modified_base 22: mod_base = OTHER; note = 2'-O-methyluridine with a 3'-phosphorothioate linkage
  modified_base 23: mod_base = cm
ttaaggaattttgcacctttctc

SEQ ID NO: 2132 - RNA, 23 nt, synthetic construct
  source 1..23: mol_type = other RNA
  modified_base 1: mod_base = OTHER; note = 2'-O-methyluridine with a 3'-phosphorothioate linkage
  modified_base 2: mod_base = OTHER; note = 2'-fluorocytidine with a 3'-phosphorothioate linkage
  modified_base 3: mod_base = um
  modified_base 4: mod_base = OTHER; note = 2'-O-methyladenosine
  modified_base 5: mod_base = OTHER; note = 2'-fluoroadenosine
  modified_base 6: mod_base = gm
  modified_base 7: mod_base = OTHER; note = 2'-fluoroguanosine
  modified_base 8: mod_base = OTHER; note = 2'-O-methyladenosine
  modified_base 9: mod_base = OTHER; note = 2'-O-methyladenosine
  modified_base 10: mod_base = um
  modified_base 11: mod_base = um
  modified_base 12: mod_base = um
  modified_base 13: mod_base = um
  modified_base 14: mod_base = OTHER; note = 2'-fluoroguanosine
  modified_base 15: mod_base = cm
  modified_base 16: mod_base = OTHER; note = 2'-fluoroadenosine
  modified_base 17: mod_base = cm
  modified_base 18: mod_base = cm
  modified_base 19: mod_base = um
  modified_base 20: mod_base = um
  modified_base 21: mod_base = OTHER; note = 2'-O-methyluridine with a 3'-phosphorothioate linkage
  modified_base 22: mod_base = OTHER; note = 2'-O-methylcytidine with a 3'-phosphorothioate linkage
  modified_base 23: mod_base = um
tctaaggaattttgcacctttct

SEQ ID NO: 2133 - RNA, 23 nt, synthetic construct
  source 1..23: mol_type = other RNA
  modified_base 1: mod_base = OTHER; note = 2'-O-methyluridine with a 3'-phosphorothioate linkage
  modified_base 2: mod_base = OTHER; note = 2'-fluoroadenosine with a 3'-phosphorothioate linkage
  modified_base 3: mod_base = cm
  modified_base 4: mod_base = um
  modified_base 5: mod_base = OTHER; note = 2'-fluoroadenosine
  modified_base 6: mod_base = OTHER; note = 2'-O-methyladenosine
  modified_base 7: mod_base = OTHER; note = 2'-fluoroguanosine
  modified_base 8: mod_base = gm
  modified_base 9: mod_base = OTHER; note = 2'-O-methyladenosine
  modified_base 10: mod_base = OTHER; note = 2'-O-methyladenosine
  modified_base 11: mod_base = um
  modified_base 12: mod_base = um
  modified_base 13: mod_base = um
  modified_base 14: mod_base = OTHER; note = 2'-fluorouridine
  modified_base 15: mod_base = gm
  modified_base 16: mod_base = OTHER; note = 2'-fluorocytidine
  modified_base 17: mod_base = OTHER; note = 2'-O-methyladenosine
  modified_base 18: mod_base = cm
  modified_base 19: mod_base = cm
  modified_base 20: mod_base = um
  modified_base 21: mod_base = OTHER; note = 2'-O-methyluridine with a 3'-phosphorothioate linkage
  modified_base 22: mod_base = OTHER; note = 2'-O-methyluridine with a 3'-phosphorothioate linkage
  modified_base 23: mod_base = cm
tactaaggaattttgcacctttc

SEQ ID NO: 2134 - RNA, 23 nt, synthetic construct
  source 1..23: mol_type = other RNA
  modified_base 1: mod_base = OTHER; note = 2'-O-methyluridine with a 3'-phosphorothioate linkage
  modified_base 2: mod_base = OTHER; note = 2'-fluorocytidine with a 3'-phosphorothioate linkage
  modified_base 3: mod_base = OTHER; note = 2'-O-methyladenosine
  modified_base 4: mod_base = cm
  modified_base 5: mod_base = OTHER; note = 2'-fluorouridine
  modified_base 6: mod_base = OTHER; note = 2'-O-methyladenosine
  modified_base 7: mod_base = OTHER; note = 2'-fluoroadenosine
  modified_base 8: mod_base = gm
  modified_base 9: mod_base = gm
  modified_base 10: mod_base = OTHER; note = 2'-O-methyladenosine
  modified_base 11: mod_base = OTHER; note = 2'-O-methyladenosine
  modified_base 12: mod_base = um
  modified_base 13: mod_base = um
  modified_base 14: mod_base = OTHER; note = 2'-fluorouridine
  modified_base 15: mod_base = um
  modified_base 16: mod_base = OTHER; note = 2'-fluoroguanosine
  modified_base 17: mod_base = cm
  modified_base 18: mod_base = OTHER; note = 2'-O-methyladenosine
  modified_base 19: mod_base = cm
  modified_base 20: mod_base = cm
  modified_base 21: mod_base = OTHER; note = 2'-O-methyluridine with a 3'-phosphorothioate linkage
  modified_base 22: mod_base = OTHER; note = 2'-O-methyluridine with a 3'-phosphorothioate linkage
  modified_base 23: mod_base = um
tcactaaggaattttgcaccttt

SEQ ID NO: 2135 - RNA, 23 nt, synthetic construct
  source 1..23: mol_type = other RNA
  modified_base 1: mod_base = OTHER; note = 2'-O-methyluridine with a 3'-phosphorothioate linkage
  modified_base 2: mod_base = OTHER; note = 2'-fluorocytidine with a 3'-phosphorothioate linkage
  modified_base 3: mod_base = OTHER; note = 2'-O-methyladenosine
  modified_base 4: mod_base = um
  modified_base 5: mod_base = OTHER; note = 2'-fluorocytidine
  modified_base 6: mod_base = OTHER; note = 2'-O-methyladenosine
  modified_base 7: mod_base = OTHER; note = 2'-fluorocytidine
  modified_base 8: mod_base = um
  modified_base 9: mod_base = OTHER; note = 2'-O-methyladenosine
  modified_base 10: mod_base = OTHER; note = 2'-O-methyladenosine
  modified_base 11: mod_base = gm
  modified_base 12: mod_base = gm
  modified_base 13: mod_base = OTHER; note = 2'-O-methyladenosine
  modified_base 14: mod_base = OTHER; note = 2'-fluoroadenosine
  modified_base 15: mod_base = um
  modified_base 16: mod_base = OTHER; note = 2'-fluorouridine
  modified_base 17: mod_base = um
  modified_base 18: mod_base = um
  modified_base 19: mod_base = gm
  modified_base 20: mod_base = cm
  modified_base 21: mod_base = OTHER; note = 2'-O-methyladenosine with a 3'-phosphorothioate linkage
  modified_base 22: mod_base = OTHER; note = 2'-O-methylcytidine with a 3'-phosphorothioate linkage
  modified_base 23: mod_base = cm
tcatcactaaggaattttgcacc

SEQ ID NO: 2136 - RNA, 23 nt, synthetic construct
  source 1..23: mol_type = other RNA
  modified_base 1: mod_base = OTHER; note = 2'-O-methyluridine with a 3'-phosphorothioate linkage
  modified_base 2: mod_base = OTHER; note = 2'-fluoroguanosine with a 3'-phosphorothioate linkage
  modified_base 3: mod_base = cm
  modified_base 4: mod_base = OTHER; note = 2'-O-methyladenosine
  modified_base 5: mod_base = OTHER; note = 2'-fluorouridine
  modified_base 6: mod_base = cm
  modified_base 7: mod_base = OTHER; note = 2'-fluoroadenosine
  modified_base 8: mod_base = cm
  modified_base 9: mod_base = um
  modified_base 10: mod_base = OTHER; note = 2'-O-methyladenosine
  modified_base 11: mod_base = OTHER; note = 2'-O-methyladenosine
  modified_base 12: mod_base = gm
  modified_base 13: mod_base = gm
  modified_base 14: mod_base = OTHER; note = 2'-fluoroadenosine
  modified_base 15: mod_base = OTHER; note = 2'-O-methyladenosine
  modified_base 16: mod_base = OTHER; note = 2'-fluorouridine
  modified_base 17: mod_base = um
  modified_base 18: mod_base = um
  modified_base 19: mod_base = um
  modified_base 20: mod_base = gm
  modified_base 21: mod_base = OTHER; note = 2'-O-methylcytidine with a 3'-phosphorothioate linkage
  modified_base 22: mod_base = OTHER; note = 2'-O-methyladenosine with a 3'-phosphorothioate linkage
  modified_base 23: mod_base = cm
tgcatcactaaggaattttgcac

SEQ ID NO: 2137 - RNA, 23 nt, synthetic construct
  source 1..23: mol_type = other RNA
  modified_base 1: mod_base = OTHER; note = 2'-O-methyluridine with a 3'-phosphorothioate linkage
  modified_base 2: mod_base = OTHER; note = 2'-fluorocytidine with a 3'-phosphorothioate linkage
  modified_base 3: mod_base = um
  modified_base 4: mod_base = cm
  modified_base 5: mod_base = OTHER; note = 2'-fluoroadenosine
  modified_base 6: mod_base = gm
  modified_base 7: mod_base = OTHER; note = 2'-fluorocytidine
  modified_base 8: mod_base = OTHER; note = 2'-O-methyladenosine
  modified_base 9: mod_base = um
  modified_base 10: mod_base = cm
  modified_base 11: mod_base = OTHER; note = 2'-O-methyladenosine
  modified_base 12: mod_base = cm
  modified_base 13: mod_base = um
  modified_base 14: mod_base = OTHER; note = 2'-fluoroadenosine
  modified_base 15: mod_base = OTHER; note = 2'-O-methyladenosine
  modified_base 16: mod_base = OTHER; note = 2'-fluoroguanosine
  modified_base 17: mod_base = gm
  modified_base 18: mod_base = OTHER; note = 2'-O-methyladenosine
  modified_base 19: mod_base = OTHER; note = 2'-O-methyladenosine
  modified_base 20: mod_base = um
  modified_base 21: mod_base = OTHER; note = 2'-O-methyluridine with a 3'-phosphorothioate linkage
  modified_base 22: mod_base = OTHER; note = 2'-O-methyluridine with a 3'-phosphorothioate linkage
  modified_base 23: mod_base = um
tctcagcatcactaaggaatttt

SEQ ID NO: 2138 - RNA, 23 nt, synthetic construct
  source 1..23: mol_type = other RNA
  modified_base 1: mod_base = OTHER; note = 2'-O-methyluridine with a 3'-phosphorothioate linkage
  modified_base 2: mod_base = OTHER; note = 2'-fluoroguanosine with a 3'-phosphorothioate linkage
  modified_base 3: mod_base = OTHER; note = 2'-O-methyladenosine
  modified_base 4: mod_base = um
  modified_base 5: mod_base = OTHER; note = 2'-fluorocytidine
  modified_base 6: mod_base = um
  modified_base 7: mod_base = OTHER; note = 2'-fluorocytidine
  modified_base 8: mod_base = OTHER; note = 2'-O-methyladenosine
  modified_base 9: mod_base = gm
  modified_base 10: mod_base = cm
  modified_base 11: mod_base = OTHER; note = 2'-O-methyladenosine
  modified_base 12: mod_base = um
  modified_base 13: mod_base = cm
  modified_base 14: mod_base = OTHER; note = 2'-fluoroadenosine
  modified_base 15: mod_base = cm
  modified_base 16: mod_base = OTHER; note = 2'-fluorouridine
  modified_base 17: mod_base = OTHER; note = 2'-O-methyladenosine
  modified_base 18: mod_base = OTHER; note = 2'-O-methyladenosine
  modified_base 19: mod_base = gm
  modified_base 20: mod_base = gm
  modified_base 21: mod_base = OTHER; note = 2'-O-methyladenosine with a 3'-phosphorothioate linkage
  modified_base 22: mod_base = OTHER; note = 2'-O-methyladenosine with a 3'-phosphorothioate linkage
  modified_base 23: mod_base = um
tgatctcagcatcactaaggaat

SEQ ID NO: 2139 - RNA, 23 nt, synthetic construct
  source 1..23: mol_type = other RNA
  modified_base 1: mod_base = OTHER; note = 2'-O-methyluridine with a 3'-phosphorothioate linkage
  modified_base 2: mod_base = OTHER; note = 2'-fluorouridine with a 3'-phosphorothioate linkage
  modified_base 3: mod_base = gm
  modified_base 4: mod_base = OTHER; note = 2'-O-methyladenosine
  modified_base 5: mod_base = OTHER; note = 2'-fluorouridine
  modified_base 6: mod_base = cm
  modified_base 7: mod_base = OTHER; note = 2'-fluorouridine
  modified_base 8: mod_base = cm
  modified_base 9: mod_base = OTHER; note = 2'-O-methyladenosine
  modified_base 10: mod_base = gm
  modified_base 11: mod_base = cm
  modified_base 12: mod_base = OTHER; note = 2'-O-methyladenosine
  modified_base 13: mod_base = um
  modified_base 14: mod_base = OTHER; note = 2'-fluorocytidine
  modified_base 15: mod_base = OTHER; note = 2'-O-methyladenosine
  modified_base 16: mod_base = OTHER; note = 2'-fluorocytidine
  modified_base 17: mod_base = um
  modified_base 18: mod_base = OTHER; note = 2'-O-methyladenosine
  modified_base 19: mod_base = OTHER; note = 2'-O-methyladenosine
  modified_base 20: mod_base = gm
  modified_base 21: mod_base = OTHER; note = 2'-O-methylguanosine with a 3'-phosphorothioate linkage
  modified_base 22: mod_base = OTHER; note = 2'-O-methyladenosine with a 3'-phosphorothioate linkage
  modified_base 23: mod_base = OTHER; note = 2'-O-methyladenosine
ttgatctcagcatcactaaggaa

SEQ ID NO: 2140 - RNA, 23 nt, synthetic construct
  source 1..23: mol_type = other RNA
  modified_base 1: mod_base = OTHER; note = 2'-O-methyluridine with a 3'-phosphorothioate linkage
  modified_base 2: mod_base = OTHER; note = 2'-fluoroguanosine with a 3'-phosphorothioate linkage
  modified_base 3: mod_base = OTHER; note = 2'-O-methyladenosine
  modified_base 4: mod_base = cm
  modified_base 5: mod_base = OTHER; note = 2'-fluorouridine
  modified_base 6: mod_base = OTHER; note = 2'-O-methyladenosine
  modified_base 7: mod_base = OTHER; note = 2'-fluoroadenosine
  modified_base 8: mod_base = cm
  modified_base 9: mod_base = um
  modified_base 10: mod_base = gm
  modified_base 11: mod_base = gm
  modified_base 12: mod_base = OTHER; note = 2'-O-methyladenosine
  modified_base 13: mod_base = um
  modified_base 14: mod_base = OTHER; note = 2'-fluoroguanosine
  modified_base 15: mod_base = OTHER; note = 2'-O-methyladenosine
  modified_base 16: mod_base = OTHER; note = 2'-fluorouridine
  modified_base 17: mod_base = cm
  modified_base 18: mod_base = um
  modified_base 19: mod_base = cm
  modified_base 20: mod_base = OTHER; note = 2'-O-methyladenosine
  modified_base 21: mod_base = OTHER; note = 2'-O-methylguanosine with a 3'-phosphorothioate linkage
  modified_base 22: mod_base = OTHER; note = 2'-O-methylcytidine with a 3'-phosphorothioate linkage
  modified_base 23: mod_base = OTHER; note = 2'-O-methyladenosine
tgactaactggatgatctcagca

SEQ ID NO: 2141 - RNA, 23 nt, synthetic construct
  source 1..23: mol_type = other RNA
  modified_base 1: mod_base = OTHER; note = 2'-O-methyluridine with a 3'-phosphorothioate linkage
  modified_base 2: mod_base = OTHER; note = 2'-fluorouridine with a 3'-phosphorothioate linkage
  modified_base 3: mod_base = gm
  modified_base 4: mod_base = OTHER; note = 2'-O-methyladenosine
  modified_base 5: mod_base = OTHER; note = 2'-fluorocytidine
  modified_base 6: mod_base = um
  modified_base 7: mod_base = OTHER; note = 2'-fluoroadenosine
  modified_base 8: mod_base = OTHER; note = 2'-O-methyladenosine
  modified_base 9: mod_base = cm
  modified_base 10: mod_base = um
  modified_base 11: mod_base = gm
  modified_base 12: mod_base = gm
  modified_base 13: mod_base = OTHER; note = 2'-O-methyladenosine
  modified_base 14: mod_base = OTHER; note = 2'-fluorouridine
  modified_base 15: mod_base = gm
  modified_base 16: mod_base = OTHER; note = 2'-fluoroadenosine
  modified_base 17: mod_base = um
  modified_base 18: mod_base = cm
  modified_base 19: mod_base = um
  modified_base 20: mod_base = cm
  modified_base 21: mod_base = OTHER; note = 2'-O-methyladenosine with a 3'-phosphorothioate linkage
  modified_base 22: mod_base = OTHER; note = 2'-O-methylguanosine with a 3'-phosphorothioate linkage
  modified_base 23: mod_base = cm
ttgactaactggatgatctcagc

SEQ ID NO: 2142 - RNA, 23 nt, synthetic construct
  source 1..23: mol_type = other RNA
  modified_base 1: mod_base = OTHER; note = 2'-O-methyluridine with a 3'-phosphorothioate linkage
  modified_base 2: mod_base = OTHER; note = 2'-fluorouridine with a 3'-phosphorothioate linkage
  modified_base 3: mod_base = um
  modified_base 4: mod_base = gm
  modified_base 5: mod_base = OTHER; note = 2'-fluoroadenosine
  modified_base 6: mod_base = cm
  modified_base 7: mod_base = OTHER; note = 2'-fluorouridine
  modified_base 8: mod_base = OTHER; note = 2'-O-methyladenosine
  modified_base 9: mod_base = OTHER; note = 2'-O-methyladenosine
  modified_base 10: mod_base = cm
  modified_base 11: mod_base = um
  modified_base 12: mod_base = gm
  modified_base 13: mod_base = gm
  modified_base 14: mod_base = OTHER; note = 2'-fluoroadenosine
  modified_base 15: mod_base = um
  modified_base 16: mod_base = OTHER; note = 2'-fluoroguanosine
  modified_base 17: mod_base = OTHER; note = 2'-O-methyladenosine
  modified_base 18: mod_base = um
  modified_base 19: mod_base = cm
  modified_base 20: mod_base = um
  modified_base 21: mod_base = OTHER; note = 2'-O-methylcytidine with a 3'-phosphorothioate linkage
  modified_base 22: mod_base = OTHER; note = 2'-O-methyladenosine with a 3'-phosphorothioate linkage
  modified_base 23: mod_base = gm
tttgactaactggatgatctcag

SEQ ID NO: 2143 - RNA, 23 nt, synthetic construct
  source 1..23: mol_type = other RNA
  modified_base 1: mod_base = OTHER; note = 2'-O-methyluridine with a 3'-phosphorothioate linkage
  modified_base 2: mod_base = OTHER; note = 2'-fluoroguanosine with a 3'-phosphorothioate linkage
  modified_base 3: mod_base = cm
  modified_base 4: mod_base = OTHER; note = 2'-O-methyladenosine
  modified_base 5: mod_base = OTHER; note = 2'-fluorouridine
  modified_base 6: mod_base = um
  modified_base 7: mod_base = OTHER; note = 2'-fluoroguanosine
  modified_base 8: mod_base = OTHER; note = 2'-O-methyladenosine
  modified_base 9: mod_base = cm
  modified_base 10: mod_base = um
  modified_base 11: mod_base = OTHER; note = 2'-O-methyladenosine
  modified_base 12: mod_base = OTHER; note = 2'-O-methyladenosine
  modified_base 13: mod_base = cm
  modified_base 14: mod_base = OTHER; note = 2'-fluorouridine
  modified_base 15: mod_base = gm
  modified_base 16: mod_base = OTHER; note = 2'-fluoroguanosine
  modified_base 17: mod_base = OTHER; note = 2'-O-methyladenosine
  modified_base 18: mod_base = um
  modified_base 19: mod_base = gm
  modified_base 20: mod_base = OTHER; note = 2'-O-methyladenosine
  modified_base 21: mod_base = OTHER; note = 2'-O-methyluridine with a 3'-phosphorothioate linkage
  modified_base 22: mod_base = OTHER; note = 2'-O-methylcytidine with a 3'-phosphorothioate linkage
  modified_base 23: mod_base = um
tgcattgactaactggatgatct

SEQ ID NO: 2144 - RNA, 23 nt, synthetic construct
  source 1..23: mol_type = other RNA
  modified_base 1: mod_base = OTHER; note = 2'-O-methyluridine with a 3'-phosphorothioate linkage
  modified_base 2: mod_base = OTHER; note = 2'-fluoroguanosine with a 3'-phosphorothioate linkage
  modified_base 3: mod_base = gm
  modified_base 4: mod_base = gm
  modified_base 5: mod_base = OTHER; note = 2'-fluoroadenosine
  modified_base 6: mod_base = um
  modified_base 7: mod_base = OTHER; note = 2'-fluoroadenosine
  modified_base 8: mod_base = um
  modified_base 9: mod_base = gm
  modified_base 10: mod_base = cm
  modified_base 11: mod_base = um
  modified_base 12: mod_base = um
  modified_base 13: mod_base = OTHER; note = 2'-O-methyladenosine
  modified_base 14: mod_base = OTHER; note = 2'-fluoroguanosine
  modified_base 15: mod_base = cm
  modified_base 16: mod_base = OTHER; note = 2'-fluoroadenosine
  modified_base 17: mod_base = um
  modified_base 18: mod_base = um
  modified_base 19: mod_base = gm
  modified_base 20: mod_base = OTHER; note = 2'-O-methyladenosine
  modified_base 21: mod_base = OTHER; note = 2'-O-methylcytidine with a 3'-phosphorothioate linkage
  modified_base 22: mod_base = OTHER; note = 2'-O-methyluridine with a 3'-phosphorothioate linkage
  modified_base 23: mod_base = OTHER; note = 2'-O-methyladenosine
tgggatatgcttagcattgacta

SEQ ID NO: 2145 - RNA, 23 nt, synthetic construct
  source 1..23: mol_type = other RNA
  modified_base 1: mod_base = OTHER; note = 2'-O-methyluridine with a 3'-phosphorothioate linkage
  modified_base 2: mod_base = OTHER; note = 2'-fluoroguanosine with a 3'-phosphorothioate linkage
  modified_base 3: mod_base = um
  modified_base 4: mod_base = OTHER; note = 2'-O-methyladenosine
  modified_base 5: mod_base = OTHER; note = 2'-fluoroguanosine
  modified_base 6: mod_base = gm
  modified_base 7: mod_base = OTHER; note = 2'-fluorocytidine
  modified_base 8: mod_base = um
  modified_base 9: mod_base = gm
  modified_base 10: mod_base = gm
  modified_base 11: mod_base = gm
  modified_base 12: mod_base = OTHER; note = 2'-O-methyladenosine
  modified_base 13: mod_base = um
  modified_base 14: mod_base = OTHER; note = 2'-fluoroadenosine
  modified_base 15: mod_base = um
  modified_base 16: mod_base = OTHER; note = 2'-fluoroguanosine
  modified_base 17: mod_base = cm
  modified_base 18: mod_base = um
  modified_base 19: mod_base = um
  modified_base 20: mod_base = OTHER; note = 2'-O-methyladenosine
  modified_base 21: mod_base = OTHER; note = 2'-O-methylguanosine with a 3'-phosphorothioate linkage
  modified_base 22: mod_base = OTHER; note = 2'-O-methylcytidine with a 3'-phosphorothioate linkage
  modified_base 23: mod_base = OTHER; note = 2'-O-methyladenosine
tgtaggctgggatatgcttagca

SEQ ID NO: 2146 - RNA, 23 nt, synthetic construct
  source 1..23: mol_type = other RNA
  modified_base 1: mod_base = OTHER; note = 2'-O-methyluridine with a 3'-phosphorothioate linkage
  modified_base 2: mod_base = OTHER; note = 2'-fluorouridine with a 3'-phosphorothioate linkage
  modified_base 3: mod_base = um
  modified_base 4: mod_base = gm
  modified_base 5: mod_base = OTHER; note = 2'-fluorouridine
  modified_base 6: mod_base = OTHER; note = 2'-O-methyladenosine
  modified_base 7: mod_base = OTHER; note = 2'-fluoroguanosine
  modified_base 8: mod_base = gm
  modified_base 9: mod_base = cm
  modified_base 10: mod_base = um
  modified_base 11: mod_base = gm
  modified_base 12: mod_base = gm
  modified_base 13: mod_base = gm
  modified_base 14: mod_base = OTHER; note = 2'-fluoroadenosine
  modified_base 15: mod_base = um
  modified_base 16: mod_base = OTHER; note = 2'-fluoroadenosine
  modified_base 17: mod_base = um
  modified_base 18: mod_base = gm
  modified_base 19: mod_base = cm
  modified_base 20: mod_base = um
  modified_base 21: mod_base = OTHER; note = 2'-O-methyluridine with a 3'-phosphorothioate linkage
  modified_base 22: mod_base = OTHER; note = 2'-O-methyladenosine with a 3'-phosphorothioate linkage
  modified_base 23: mod_base = gm
tttgtaggctgggatatgcttag

SEQ ID NO: 2147 - RNA, 23 nt, synthetic construct
  source 1..23: mol_type = other RNA
  modified_base 1: mod_base = OTHER; note = 2'-O-methyluridine with a 3'-phosphorothioate linkage
  modified_base 2: mod_base = OTHER; note = 2'-fluoroadenosine with a 3'-phosphorothioate linkage
  modified_base 3: mod_base = gm
  modified_base 4: mod_base = um
  modified_base 5: mod_base = OTHER; note = 2'-fluorouridine
  modified_base 6: mod_base = um
  modified_base 7: mod_base = OTHER; note = 2'-fluorocytidine
  modified_base 8: mod_base = cm
  modified_base 9: mod_base = OTHER; note = 2'-O-methyladenosine
  modified_base 10: mod_base = um
  modified_base 11: mod_base = cm
  modified_base 12: mod_base = OTHER; note = 2'-O-methyladenosine
  modified_base 13: mod_base = gm
  modified_base 14: mod_base = OTHER; note = 2'-fluoroadenosine
  modified_base 15: mod_base = gm
  modified_base 16: mod_base = OTHER; note = 2'-fluorouridine
  modified_base 17: mod_base = um
  modified_base 18: mod_base = um
  modified_base 19: mod_base = cm
  modified_base 20: mod_base = cm
  modified_base 21: mod_base = OTHER; note = 2'-O-methyladenosine with a 3'-phosphorothioate linkage
  modified_base 22: mod_base = OTHER; note = 2'-O-methyladenosine with a 3'-phosphorothioate linkage
  modified_base 23: mod_base = cm
tagtttccatcagagtttccaac

SEQ ID NO: 2148 - RNA, 23 nt, synthetic construct
  source 1..23: mol_type = other RNA
  modified_base 1: mod_base = OTHER; note = 2'-O-methyluridine with a 3'-phosphorothioate linkage
  modified_base 2: mod_base = OTHER; note = 2'-fluoroguanosine with a 3'-phosphorothioate linkage
  modified_base 3: mod_base = OTHER; note = 2'-O-methyladenosine
  modified_base 4: mod_base = gm
  modified_base 5: mod_base = OTHER; note = 2'-fluorouridine
  modified_base 6: mod_base = um
  modified_base 7: mod_base = OTHER; note = 2'-fluorouridine
  modified_base 8: mod_base = cm
  modified_base 9: mod_base = cm
  modified_base 10: mod_base = OTHER; note = 2'-O-methyladenosine
  modified_base 11: mod_base = um
  modified_base 12: mod_base = cm
  modified_base 13: mod_base = OTHER; note = 2'-O-methyladenosine
  modified_base 14: mod_base = OTHER; note = 2'-fluoroguanosine
  modified_base 15: mod_base = OTHER; note = 2'-O-methyladenosine
  modified_base 16: mod_base = OTHER; note = 2'-fluoroguanosine
  modified_base 17: mod_base = um
  modified_base 18: mod_base = um
  modified_base 19: mod_base = um
  modified_base 20: mod_base = cm
  modified_base 21: mod_base = OTHER; note = 2'-O-methylcytidine with a 3'-phosphorothioate linkage
  modified_base 22: mod_base = OTHER; note = 2'-O-methyladenosine with a 3'-phosphorothioate linkage
  modified_base 23: mod_base = OTHER; note = 2'-O-methyladenosine
tgagtttccatcagagtttccaa

SEQ ID NO: 2149 - RNA, 23 nt, synthetic construct
  source 1..23: mol_type = other RNA
  modified_base 1: mod_base = OTHER; note = 2'-O-methyluridine with a 3'-phosphorothioate linkage
  modified_base 2: mod_base = OTHER; note = 2'-fluorouridine with a 3'-phosphorothioate linkage
  modified_base 3: mod_base = gm
  modified_base 4: mod_base = OTHER; note = 2'-O-methyladenosine
  modified_base 5: mod_base = OTHER; note = 2'-fluoroguanosine
  modified_base 6: mod_base = um
  modified_base 7: mod_base = OTHER; note = 2'-fluorouridine
  modified_base 8: mod_base = um
  modified_base 9: mod_base = cm
  modified_base 10: mod_base = cm
  modified_base 11: mod_base = OTHER; note = 2'-O-methyladenosine
  modified_base 12: mod_base = um
  modified_base 13: mod_base = cm
  modified_base 14: mod_base = OTHER; note = 2'-fluoroadenosine
  modified_base 15: mod_base = gm
  modified_base 16: mod_base = OTHER; note = 2'-fluoroadenosine
  modified_base 17: mod_base = gm
  modified_base 18: mod_base = um
  modified_base 19: mod_base = um
  modified_base 20: mod_base = um
  modified_base 21: mod_base = OTHER; note = 2'-O-methylcytidine with a 3'-phosphorothioate linkage
  modified_base 22: mod_base = OTHER; note = 2'-O-methylcytidine with a 3'-phosphorothioate linkage
  modified_base 23: mod_base = OTHER; note = 2'-O-methyladenosine
ttgagtttccatcagagtttcca

SEQ ID NO: 2150 - RNA, 23 nt, synthetic construct
  source 1..23: mol_type = other RNA
  modified_base 1: mod_base = OTHER; note = 2'-O-methyluridine with a 3'-phosphorothioate linkage
  modified_base 2: mod_base = OTHER; note = 2'-fluoroadenosine with a 3'-phosphorothioate linkage
  modified_base 3: mod_base = um
  modified_base 4: mod_base = gm
  modified_base 5: mod_base = OTHER; note = 2'-fluoroadenosine
  modified_base 6: mod_base = gm
  modified_base 7: mod_base = OTHER; note = 2'-fluorouridine
  modified_base 8: mod_base = um
  modified_base 9: mod_base = um
  modified_base 10: mod_base = cm
  modified_base 11: mod_base = cm
  modified_base 12: mod_base = OTHER; note = 2'-O-methyladenosine
  modified_base 13: mod_base = um
  modified_base 14: mod_base = OTHER; note = 2'-fluorocytidine
  modified_base 15: mod_base = OTHER; note = 2'-O-methyladenosine
  modified_base 16: mod_base = OTHER; note = 2'-fluoroguanosine
  modified_base 17: mod_base = OTHER; note = 2'-O-methyladenosine
  modified_base 18: mod_base = gm
  modified_base 19: mod_base = um
  modified_base 20: mod_base = um
  modified_base 21: mod_base = OTHER; note = 2'-O-methyluridine with a 3'-phosphorothioate linkage
  modified_base 22: mod_base = OTHER; note = 2'-O-methylcytidine with a 3'-phosphorothioate linkage
  modified_base 23: mod_base = cm
tatgagtttccatcagagtttcc

SEQ ID NO: 2151 - RNA, 23 nt, synthetic construct
  source 1..23: mol_type = other RNA
  modified_base 1: mod_base = OTHER; note = 2'-O-methyluridine with a 3'-phosphorothioate linkage
  modified_base 2: mod_base = OTHER; note = 2'-fluorocytidine with a 3'-phosphorothioate linkage
  modified_base 3: mod_base = OTHER; note = 2'-O-methyladenosine
  modified_base 4: mod_base = cm
  modified_base 5: mod_base = OTHER; note = 2'-fluoroguanosine
  modified_base 6: mod_base = cm
  modified_base 7: mod_base = OTHER; note = 2'-fluorouridine
  modified_base 8: mod_base = cm
  modified_base 9: mod_base = OTHER; note = 2'-O-methyladenosine
  modified_base 10: mod_base = um
  modified_base 11: mod_base = gm
  modified_base 12: mod_base = OTHER; note = 2'-O-methyladenosine
  modified_base 13: mod_base = gm
  modified_base 14: mod_base = OTHER; note = 2'-fluorouridine
  modified_base 15: mod_base = um
  modified_base 16: mod_base = OTHER; note = 2'-fluorouridine
  modified_base 17: mod_base = cm
  modified_base 18: mod_base = cm
  modified_base 19: mod_base = OTHER; note = 2'-O-methyladenosine
  modified_base 20: mod_base = um
  modified_base 21: mod_base = OTHER; note = 2'-O-methylcytidine with a 3'-phosphorothioate linkage
  modified_base 22: mod_base = OTHER; note = 2'-O-methyladenosine with a 3'-phosphorothioate linkage
  modified_base 23: mod_base = gm
tcacgctcatgagtttccatcag

SEQ ID NO: 2152 - RNA, 23 nt, synthetic construct
  source 1..23: mol_type = other RNA
  modified_base 1: mod_base = OTHER; note = 2'-O-methyluridine with a 3'-phosphorothioate linkage
  modified_base 2: mod_base = OTHER; note = 2'-fluorocytidine with a 3'-phosphorothioate linkage
  modified_base 3: mod_base = cm
  modified_base 4: mod_base = OTHER; note = 2'-O-methyladenosine
  modified_base 5: mod_base = OTHER; note = 2'-fluorocytidine
  modified_base 6: mod_base = gm
  modified_base 7: mod_base = OTHER; note = 2'-fluorocytidine
  modified_base 8: mod_base = um
  modified_base 9: mod_base = cm
  modified_base 10: mod_base = OTHER; note = 2'-O-methyladenosine
  modified_base 11: mod_base = um
  modified_base 12: mod_base = gm
  modified_base 13: mod_base = OTHER; note = 2'-O-methyladenosine
  modified_base 14: mod_base = OTHER; note = 2'-fluoroguanosine
  modified_base 15: mod_base = um
  modified_base 16: mod_base = OTHER; note = 2'-fluorouridine
  modified_base 17: mod_base = um
  modified_base 18: mod_base = cm
  modified_base 19: mod_base = cm
  modified_base 20: mod_base = OTHER; note = 2'-O-methyladenosine
  modified_base 21: mod_base = OTHER; note = 2'-O-methyluridine with a 3'-phosphorothioate linkage
  modified_base 22: mod_base = OTHER; note = 2'-O-methylcytidine with a 3'-phosphorothioate linkage
  modified_base 23: mod_base = OTHER; note = 2'-O-methyladenosine
tccacgctcatgagtttccatca

SEQ ID NO: 2153 - RNA, 23 nt, synthetic construct
  source 1..23: mol_type = other RNA
  modified_base 1: mod_base = OTHER; note = 2'-O-methyluridine with a 3'-phosphorothioate linkage
  modified_base 2: mod_base = OTHER; note = 2'-fluoroadenosine with a 3'-phosphorothioate linkage
  modified_base 3: mod_base = cm
  modified_base 4: mod_base = cm
  modified_base 5: mod_base = OTHER; note = 2'-fluoroadenosine
  modified_base 6: mod_base = cm
  modified_base 7: mod_base = OTHER; note = 2'-fluoroguanosine
  modified_base 8: mod_base = cm
  modified_base 9: mod_base = um
  modified_base 10: mod_base = cm
  modified_base 11: mod_base = OTHER; note = 2'-O-methyladenosine
  modified_base 12: mod_base = um
  modified_base 13: mod_base = gm
  modified_base 14: mod_base = OTHER; note = 2'-fluoroadenosine
  modified_base 15: mod_base = gm
  modified_base 16: mod_base = OTHER; note = 2'-fluorouridine
  modified_base 17: mod_base = um
  modified_base 18: mod_base = um
  modified_base 19: mod_base = cm
  modified_base 20: mod_base = cm
  modified_base 21: mod_base = OTHER; note = 2'-O-methyladenosine with a 3'-phosphorothioate linkage
  modified_base 22: mod_base = OTHER; note = 2'-O-methyluridine with a 3'-phosphorothioate linkage
  modified_base 23: mod_base = cm
taccacgctcatgagtttccatc

SEQ ID NO: 2154 - RNA, 23 nt, synthetic construct
  source 1..23: mol_type = other RNA
  modified_base 1: mod_base = OTHER; note = 2'-O-methyluridine with a 3'-phosphorothioate linkage
  modified_base 2: mod_base = OTHER; note = 2'-fluorocytidine with a 3'-phosphorothioate linkage
  modified_base 3: mod_base = OTHER; note = 2'-O-methyladenosine
  modified_base 4: mod_base = cm
  modified_base 5: mod_base = OTHER; note = 2'-fluorocytidine
  modified_base 6: mod_base = OTHER; note = 2'-O-methyladenosine
  modified_base 7: mod_base = OTHER; note = 2'-fluorocytidine
  modified_base 8: mod_base = gm
  modified_base 9: mod_base = cm
  modified_base 10: mod_base = um
  modified_base 11: mod_base = cm
  modified_base 12: mod_base = OTHER; note = 2'-O-methyladenosine
  modified_base 13: mod_base = um
  modified_base 14: mod_base = OTHER; note = 2'-fluoroguanosine
  modified_base 15: mod_base = OTHER; note = 2'-O-methyladenosine
  modified_base 16: mod_base = OTHER; note = 2'-fluoroguanosine
  modified_base 17: mod_base = um
  modified_base 18: mod_base = um
  modified_base 19: mod_base = um
  modified_base 20: mod_base = cm
  modified_base 21: mod_base = OTHER; note = 2'-O-methylcytidine with a 3'-phosphorothioate linkage
  modified_base 22: mod_base = OTHER; note = 2'-O-methyladenosine with a 3'-phosphorothioate linkage
  modified_base 23: mod_base = um
tcaccacgctcatgagtttccat

SEQ ID NO: 2155 - RNA, 23 nt, synthetic construct
  source 1..23: mol_type = other RNA
  modified_base 1: mod_base = OTHER; note = 2'-O-methyluridine with a 3'-phosphorothioate linkage
  modified_base 2: mod_base = OTHER; note = 2'-fluoroadenosine with a 3'-phosphorothioate linkage
  modified_base 3: mod_base = cm
  modified_base 4: mod_base = OTHER; note = 2'-O-methyladenosine
  modified_base 5: mod_base = OTHER; note = 2'-fluorocytidine
  modified_base 6: mod_base = cm
  modified_base 7: mod_base = OTHER; note = 2'-fluoroadenosine
  modified_base 8: mod_base = cm
  modified_base 9: mod_base = gm
  modified_base 10: mod_base = cm
  modified_base 11: mod_base = um
  modified_base 12: mod_base = cm
  modified_base 13: mod_base = OTHER; note = 2'-O-methyladenosine
  modified_base 14: mod_base = OTHER; note = 2'-fluorouridine
  modified_base 15: mod_base = gm
  modified_base 16: mod_base = OTHER; note = 2'-fluoroadenosine
  modified_base 17: mod_base = gm
  modified_base 18: mod_base = um
  modified_base 19: mod_base = um
  modified_base 20: mod_base = um
  modified_base 21: mod_base = OTHER; note = 2'-O-methylcytidine with a 3'-phosphorothioate linkage
  modified_base 22: mod_base = OTHER; note = 2'-O-methylcytidine with a 3'-phosphorothioate linkage
  modified_base 23: mod_base = OTHER; note = 2'-O-methyladenosine
tacaccacgctcatgagtttcca

SEQ ID NO: 2156 - RNA, 23 nt, synthetic construct
  source 1..23: mol_type = other RNA
  modified_base 1: mod_base = OTHER; note = 2'-O-methyluridine with a 3'-phosphorothioate linkage
  modified_base 2: mod_base = OTHER; note = 2'-fluoroguanosine with a 3'-phosphorothioate linkage
  modified_base 3: mod_base = cm
  modified_base 4: mod_base = gm
  modified_base 5: mod_base = OTHER; note = 2'-fluoroadenosine
  modified_base 6: mod_base = OTHER; note = 2'-O-methyladenosine
  modified_base 7: mod_base = OTHER; note = 2'-fluorouridine
  modified_base 8: mod_base = OTHER; note = 2'-O-methyladenosine
  modified_base 9: mod_base = gm
  modified_base 10: mod_base = OTHER; note = 2'-O-methyladenosine
  modified_base 11: mod_base = um
  modified_base 12: mod_base = OTHER; note = 2'-O-methyladenosine
  modified_base 13: mod_base = cm
  modified_base 14: mod_base = OTHER; note = 2'-fluoroadenosine
  modified_base 15: mod_base = cm
  modified_base 16: mod_base = OTHER; note = 2'-fluorocytidine
  modified_base 17: mod_base = OTHER; note = 2'-O-methyladenosine
  modified_base 18: mod_base = cm
  modified_base 19: mod_base = gm
  modified_base 20: mod_base = cm
  modified_base 21: mod_base = OTHER; note = 2'-O-methyluridine with a 3'-phosphorothioate linkage
  modified_base 22: mod_base = OTHER; note = 2'-O-methylcytidine with a 3'-phosphorothioate linkage
  modified_base 23: mod_base = OTHER; note = 2'-O-methyladenosine
tgcgaatagatacaccacgctca

SEQ ID NO: 2157 - RNA, 23 nt, synthetic construct
  source 1..23: mol_type = other RNA
  modified_base 1: mod_base = OTHER; note = 2'-O-methyluridine with a 3'-phosphorothioate linkage
  modified_base 2: mod_base = OTHER; note = 2'-fluoroadenosine with a 3'-phosphorothioate linkage
  modified_base 3: mod_base = um
  modified_base 4: mod_base = um
  modified_base 5: mod_base = OTHER; note = 2'-fluoroadenosine
  modified_base 6: mod_base = um
  modified_base 7: mod_base = OTHER; note = 2'-fluoroadenosine
  modified_base 8: mod_base = OTHER; note = 2'-O-methyladenosine
  modified_base 9: mod_base = um
  modified_base 10: mod_base = cm
  modified_base 11: mod_base = cm
  modified_base 12: mod_base = cm
  modified_base 13: mod_base = um
  modified_base 14: mod_base = OTHER; note = 2'-fluoroguanosine
  modified_base 15: mod_base = um
  modified_base 16: mod_base = OTHER; note = 2'-fluoroadenosine
  modified_base 17: mod_base = OTHER; note = 2'-O-methyladenosine
  modified_base 18: mod_base = gm
  modified_base 19: mod_base = gm
  modified_base 20: mod_base = um
  modified_base 21: mod_base = OTHER; note = 2'-O-methyladenosine with a 3'-phosphorothioate linkage
  modified_base 22: mod_base = OTHER; note = 2'-O-methylguanosine with a 3'-phosphorothioate linkage
  modified_base 23: mod_base = gm
tattataatccctgtaaggtagg

SEQ ID NO: 2158 - RNA, 23 nt, synthetic construct
  source 1..23: mol_type = other RNA
  modified_base 1: mod_base = OTHER; note = 2'-O-methyluridine with a 3'-phosphorothioate linkage
  modified_base 2: mod_base = OTHER; note = 2'-fluoroadenosine with a 3'-phosphorothioate linkage
  modified_base 3: mod_base = OTHER; note = 2'-O-methyladenosine
  modified_base 4: mod_base = um
  modified_base 5: mod_base = OTHER; note = 2'-fluorouridine
  modified_base 6: mod_base = OTHER; note = 2'-O-methyladenosine
  modified_base 7: mod_base = OTHER; note = 2'-fluorouridine
  modified_base 8: mod_base = OTHER; note = 2'-O-methyladenosine
  modified_base 9: mod_base = OTHER; note = 2'-O-methyladenosine
  modified_base 10: mod_base = um
  modified_base 11: mod_base = cm
  modified_base 12: mod_base = cm
  modified_base 13: mod_base = cm
  modified_base 14: mod_base = OTHER; note = 2'-fluorouridine
  modified_base 15: mod_base = gm
  modified_base 16: mod_base = OTHER; note = 2'-fluorouridine
  modified_base 17: mod_base = OTHER; note = 2'-O-methyladenosine
  modified_base 18: mod_base = OTHER; note = 2'-O-methyladenosine
  modified_base 19: mod_base = gm
  modified_base 20: mod_base = gm
  modified_base 21: mod_base = OTHER; note = 2'-O-methyluridine with a 3'-phosphorothioate linkage
  modified_base 22: mod_base = OTHER; note = 2'-O-methyladenosine with a 3'-phosphorothioate linkage
  modified_base 23: mod_base = gm
taattataatccctgtaaggtag

SEQ ID NO: 2159 - RNA, 23 nt, synthetic construct
  source 1..23: mol_type = other RNA
  modified_base 1: mod_base = OTHER; note = 2'-O-methyluridine with a 3'-phosphorothioate linkage
  modified_base 2: mod_base = OTHER; note = 2'-fluorocytidine with a 3'-phosphorothioate linkage
  modified_base 3: mod_base = OTHER; note = 2'-O-methyladenosine
  modified_base 4: mod_base = OTHER; note = 2'-O-methyladenosine
  modified_base 5: mod_base = OTHER; note = 2'-fluoroguanosine
  modified_base 6: mod_base = gm
  modified_base 7: mod_base = OTHER; note = 2'-fluoroadenosine
  modified_base 8: mod_base = gm
  modified_base 9: mod_base = um
  modified_base 10: mod_base = OTHER; note = 2'-O-methyladenosine
  modified_base 11: mod_base = OTHER; note = 2'-O-methyladenosine
  modified_base 12: mod_base = um
  modified_base 13: mod_base = um
  modified_base 14: mod_base = OTHER; note = 2'-fluoroadenosine
  modified_base 15: mod_base = um
  modified_base 16: mod_base = OTHER; note = 2'-fluoroadenosine
  modified_base 17: mod_base = OTHER; note = 2'-O-methyladenosine
  modified_base 18: mod_base = um
  modified_base 19: mod_base = cm
  modified_base 20: mod_base = cm
  modified_base 21: mod_base = OTHER; note = 2'-O-methylcytidine with a 3'-phosphorothioate linkage
  modified_base 22: mod_base = OTHER; note = 2'-O-methyluridine with a 3'-phosphorothioate linkage
  modified_base 23: mod_base = gm
tcaaggagtaattataatccctg

SEQ ID NO: 2160 - RNA, 23 nt, synthetic construct
  source 1..23: mol_type = other RNA
  modified_base 1: mod_base = OTHER; note = 2'-O-methyluridine with a 3'-phosphorothioate linkage
  modified_base 2: mod_base = OTHER; note = 2'-fluorocytidine with a 3'-phosphorothioate linkage
  modified_base 3: mod_base = cm
  modified_base 4: mod_base = OTHER; note = 2'-O-methyladenosine
  modified_base 5: mod_base = OTHER; note = 2'-fluoroadenosine
  modified_base 6: mod_base = gm
  modified_base 7: mod_base = OTHER; note = 2'-fluoroguanosine
  modified_base 8: mod_base = OTHER; note = 2'-O-methyladenosine
  modified_base 9: mod_base = gm
  modified_base 10: mod_base = um
  modified_base 11: mod_base = OTHER; note = 2'-O-methyladenosine
  modified_base 12: mod_base = OTHER; note = 2'-O-methyladenosine
  modified_base 13: mod_base = um
  modified_base 14: mod_base = OTHER; note = 2'-fluorouridine
  modified_base 15: mod_base = OTHER; note = 2'-O-methyladenosine
  modified_base 16: mod_base = OTHER; note = 2'-fluorouridine
  modified_base 17: mod_base = OTHER; note = 2'-O-methyladenosine
  modified_base 18: mod_base = OTHER; note = 2'-O-methyladenosine
  modified_base 19: mod_base = um
  modified_base 20: mod_base = cm
  modified_base 21: mod_base = OTHER; note = 2'-O-methylcytidine with a 3'-phosphorothioate linkage
  modified_base 22: mod_base = OTHER; note = 2'-O-methylcytidine with a 3'-phosphorothioate linkage
  modified_base 23: mod_base = um
tccaaggagtaattataatccct

SEQ ID NO: 2161 - RNA, 23 nt, synthetic construct
  source 1..23: mol_type = other RNA
  modified_base 1: mod_base = OTHER; note = 2'-O-methyluridine with a 3'-phosphorothioate linkage
  modified_base 2: mod_base = OTHER; note = 2'-fluoroadenosine with a 3'-phosphorothioate linkage
  modified_base 3: mod_base = cm
  modified_base 4: mod_base = cm
  modified_base 5: mod_base = OTHER; note = 2'-fluoroadenosine
  modified_base 6: mod_base = OTHER; note = 2'-O-methyladenosine
  modified_base 7: mod_base = OTHER; note = 2'-fluoroguanosine
  modified_base 8: mod_base = gm
  modified_base 9: mod_base = OTHER; note = 2'-O-methyladenosine
  modified_base 10: mod_base = gm
  modified_base 11: mod_base = um
  modified_base 12: mod_base = OTHER; note = 2'-O-methyladenosine
  modified_base 13: mod_base = OTHER; note = 2'-O-methyladenosine
  modified_base 14: mod_base = OTHER; note = 2'-fluorouridine
  modified_base 15: mod_base = um
  modified_base 16: mod_base = OTHER; note = 2'-fluoroadenosine
  modified_base 17: mod_base = um
  modified_base 18: mod_base = OTHER; note = 2'-O-methyladenosine
  modified_base 19: mod_base = OTHER; note = 2'-O-methyladenosine
  modified_base 20: mod_base = um
  modified_base 21: mod_base = OTHER; note = 2'-O-methylcytidine with a 3'-phosphorothioate linkage
  modified_base 22: mod_base = OTHER; note = 2'-O-methylcytidine with a 3'-phosphorothioate linkage
  modified_base 23: mod_base = cm
taccaaggagtaattataatccc

SEQ ID NO: 2162 - RNA, 23 nt, synthetic construct
  source 1..23: mol_type = other RNA
  modified_base 1: mod_base = OTHER; note = 2'-O-methyluridine with a 3'-phosphorothioate linkage
  modified_base 2: mod_base = OTHER; note = 2'-fluorocytidine with a 3'-phosphorothioate linkage
  modified_base 3: mod_base = OTHER; note = 2'-O-methyladenosine
  modified_base 4: mod_base = cm
  modified_base 5: mod_base = OTHER; note = 2'-fluorocytidine
  modified_base 6: mod_base = OTHER; note = 2'-O-methyladenosine
  modified_base 7: mod_base = OTHER; note = 2'-fluoroadenosine
  modified_base 8: mod_base = gm
  modified_base 9: mod_base = gm
  modified_base 10: mod_base = OTHER; note = 2'-O-methyladenosine
  modified_base 11: mod_base = gm
  modified_base 12: mod_base = um
  modified_base 13: mod_base = OTHER; note = 2'-O-methyladenosine
  modified_base 14: mod_base = OTHER; note = 2'-fluoroadenosine
  modified_base 15: mod_base = um
  modified_base 16: mod_base = OTHER; note = 2'-fluorouridine
  modified_base 17: mod_base = OTHER; note = 2'-O-methyladenosine
  modified_base 18: mod_base = um
  modified_base 19: mod_base = OTHER; note = 2'-O-methyladenosine
  modified_base 20: mod_base = OTHER; note = 2'-O-methyladenosine
  modified_base 21: mod_base = OTHER; note = 2'-O-methyluridine with a 3'-phosphorothioate linkage
  modified_base 22: mod_base = OTHER; note = 2'-O-methylcytidine with a 3'-phosphorothioate linkage
  modified_base 23: mod_base = cm
tcaccaaggagtaattataatcc

SEQ ID NO: 2163 - RNA, 23 nt, synthetic construct
  source 1..23: mol_type = other RNA
  modified_base 1: mod_base = OTHER; note = 2'-O-methyluridine with a 3'-phosphorothioate linkage
  modified_base 2: mod_base = OTHER; note = 2'-fluorocytidine with a 3'-phosphorothioate linkage
  modified_base 3: mod_base = cm
  modified_base 4: mod_base = cm
  modified_base 5: mod_base = OTHER; note = 2'-fluoroadenosine
  modified_base 6: mod_base = um
  modified_base 7: mod_base = OTHER; note = 2'-fluorocytidine
  modified_base 8: mod_base = OTHER; note = 2'-O-methyladenosine
  modified_base 9: mod_base = cm
  modified_base 10: mod_base = cm
  modified_base 11: mod_base = OTHER; note = 2'-O-methyladenosine
  modified_base 12: mod_base = OTHER; note = 2'-O-methyladenosine
  modified_base 13: mod_base = gm
  modified_base 14: mod_base = OTHER; note = 2'-fluoroguanosine
  modified_base 15: mod_base = OTHER; note = 2'-O-methyladenosine
  modified_base 16: mod_base = OTHER; note = 2'-fluoroguanosine
  modified_base 17: mod_base = um
  modified_base 18: mod_base = OTHER; note = 2'-O-methyladenosine
  modified_base 19: mod_base = OTHER; note = 2'-O-methyladenosine
  modified_base 20: mod_base = um
  modified_base 21: mod_base = OTHER; note = 2'-O-methyluridine with a 3'-phosphorothioate linkage
  modified_base 22: mod_base = OTHER; note = 2'-O-methyladenosine with a 3'-phosphorothioate linkage
  modified_base 23: mod_base = um
tcccatcaccaaggagtaattat

SEQ ID NO: 2164 - RNA, 23 nt, synthetic construct
  source 1..23: mol_type = other RNA
  modified_base 1: mod_base = OTHER; note = 2'-O-methyluridine with a 3'-phosphorothioate linkage
  modified_base 2: mod_base = OTHER; note = 2'-fluorouridine with a 3'-phosphorothioate linkage
  modified_base 3: mod_base = cm
  modified_base 4: mod_base = cm
  modified_base 5: mod_base = OTHER; note = 2'-fluorocytidine
  modified_base 6: mod_base = OTHER; note = 2'-O-methyladenosine
  modified_base 7: mod_base = OTHER; note = 2'-fluorouridine
  modified_base 8: mod_base = cm
  modified_base 9: mod_base = OTHER; note = 2'-O-methyladenosine
  modified_base 10: mod_base = cm
  modified_base 11: mod_base = cm
  modified_base 12: mod_base = OTHER; note = 2'-O-methyladenosine
  modified_base 13: mod_base = OTHER; note = 2'-O-methyladenosine
  modified_base 14: mod_base = OTHER; note = 2'-fluoroguanosine
  modified_base 15: mod_base = gm
  modified_base 16: mod_base = OTHER; note = 2'-fluoroadenosine
  modified_base 17: mod_base = gm
  modified_base 18: mod_base = um
  modified_base 19: mod_base = OTHER; note = 2'-O-methyladenosine
  modified_base 20: mod_base = OTHER; note = 2'-O-methyladenosine
  modified_base 21: mod_base = OTHER; note = 2'-O-methyluridine with a 3'-phosphorothioate linkage
  modified_base 22: mod_base = OTHER; note = 2'-O-methyluridine with a 3'-phosphorothioate linkage
  modified_base 23: mod_base = OTHER; note = 2'-O-methyladenosine
ttcccatcaccaaggagtaatta

SEQ ID NO: 2165 - RNA, 23 nt, synthetic construct
  source 1..23: mol_type = other RNA
  modified_base 1: mod_base = OTHER; note = 2'-O-methyluridine with a 3'-phosphorothioate linkage
  modified_base 2: mod_base = OTHER; note = 2'-fluoroadenosine with a 3'-phosphorothioate linkage
  modified_base 3: mod_base = cm
  modified_base 4: mod_base = OTHER; note = 2'-O-methyladenosine
  modified_base 5: mod_base = OTHER; note = 2'-fluoroadenosine
  modified_base 6: mod_base = gm
  modified_base 7: mod_base = OTHER; note = 2'-fluorocytidine
  modified_base 8: mod_base = um
  modified_base 9: mod_base = cm
  modified_base 10: mod_base = cm
  modified_base 11: mod_base = cm
  modified_base 12: mod_base = OTHER; note = 2'-O-methyladenosine
  modified_base 13: mod_base = um
  modified_base 14: mod_base = OTHER; note = 2'-fluorocytidine
  modified_base 15: mod_base = OTHER; note = 2'-O-methyladenosine
  modified_base 16: mod_base = OTHER; note = 2'-fluorocytidine
  modified_base 17: mod_base = cm
  modified_base 18: mod_base = OTHER; note = 2'-O-methyladenosine
  modified_base 19: mod_base = OTHER; note = 2'-O-methyladenosine
  modified_base 20: mod_base = gm
  modified_base 21: mod_base = OTHER; note = 2'-O-methylguanosine with a 3'-phosphorothioate linkage
  modified_base 22: mod_base = OTHER; note = 2'-O-methyladenosine with a 3'-phosphorothioate linkage
  modified_base 23: mod_base = gm
tacaagctcccatcaccaaggag

SEQ ID NO: 2166 - RNA, 23 nt, synthetic construct
  source 1..23: mol_type = other RNA
  modified_base 1: mod_base = OTHER; note = 2'-O-methyluridine with a 3'-phosphorothioate linkage
  modified_base 2: mod_base = OTHER; note = 2'-fluoroadenosine with a 3'-phosphorothioate linkage
  modified_base 3: mod_base = cm
  modified_base 4: mod_base = OTHER; note = 2'-O-methyladenosine
  modified_base 5: mod_base = OTHER; note = 2'-fluoroadenosine
  modified_base 6: mod_base = cm
  modified_base 7: mod_base = OTHER; note = 2'-fluoroadenosine
  modified_base 8: mod_base = OTHER; note = 2'-O-methyladenosine
  modified_base 9: mod_base = gm
  modified_base 10: mod_base = cm
  modified_base 11: mod_base = um
  modified_base 12: mod_base = cm
  modified_base 13: mod_base = cm
  modified_base 14: mod_base = OTHER; note = 2'-fluorocytidine
  modified_base 15: mod_base = OTHER; note = 2'-O-methyladenosine
  modified_base 16: mod_base = OTHER; note = 2'-fluorouridine
  modified_base 17: mod_base = cm
  modified_base 18: mod_base = OTHER; note = 2'-O-methyladenosine
  modified_base 19: mod_base = cm
  modified_base 20: mod_base = cm
  modified_base 21: mod_base = OTHER; note = 2'-O-methyladenosine with a 3'-phosphorothioate linkage
  modified_base 22: mod_base = OTHER; note = 2'-O-methyladenosine with a 3'-phosphorothioate linkage
  modified_base 23: mod_base = gm
tacaacaagctcccatcaccaag

SEQ ID NO: 2167 - RNA, 23 nt, synthetic construct
  source 1..23: mol_type = other RNA
  modified_base 1: mod_base = OTHER; note = 2'-O-methyluridine with a 3'-phosphorothioate linkage
  modified_base 2: mod_base = OTHER; note = 2'-fluoroguanosine with a 3'-phosphorothioate linkage
  modified_base 3: mod_base = gm
  modified_base 4: mod_base = OTHER; note = 2'-O-methyladenosine
  modified_base 5: mod_base = OTHER; note = 2'-fluorouridine
  modified_base 6: mod_base = gm
  modified_base 7: mod_base = OTHER; note = 2'-fluoroguanosine
  modified_base 8: mod_base = gm
  modified_base 9: mod_base = cm
  modified_base 10: mod_base = OTHER; note = 2'-O-methyladenosine
  modified_base 11: mod_base = um
  modified_base 12: mod_base = OTHER; note = 2'-O-methyladenosine
  modified_base 13: mod_base = um
  modified_base 14: mod_base = OTHER; note = 2'-fluoroadenosine
  modified_base 15: mod_base = um
  modified_base 16: mod_base = OTHER; note = 2'-fluorocytidine
  modified_base 17: mod_base = cm
  modified_base 18: mod_base = OTHER; note = 2'-O-methyladenosine
  modified_base 19: mod_base = OTHER; note = 2'-O-methyladenosine
  modified_base 20: mod_base = um
  modified_base 21: mod_base = OTHER; note = 2'-O-methyladenosine with a 3'-phosphorothioate linkage
  modified_base 22: mod_base = OTHER; note = 2'-O-methyladenosine with a 3'-phosphorothioate linkage
  modified_base 23: mod_base = cm
tggatgggcatatatccaataac

SEQ ID NO: 2168 - RNA, 23 nt, synthetic construct
  source 1..23: mol_type = other RNA
  modified_base 1: mod_base = OTHER; note = 2'-O-methyluridine with a 3'-phosphorothioate linkage
  modified_base 2: mod_base = OTHER; note = 2'-fluoroguanosine with a 3'-phosphorothioate linkage
  modified_base 3: mod_base = gm
  modified_base 4: mod_base = gm
  modified_base 5: mod_base = OTHER; note = 2'-fluoroadenosine
  modified_base 6: mod_base = um
  modified_base 7: mod_base = OTHER; note = 2'-fluoroguanosine
  modified_base 8: mod_base = gm
  modified_base 9: mod_base = gm
  modified_base 10: mod_base = cm
  modified_base 11: mod_base = OTHER; note = 2'-O-methyladenosine
  modified_base 12: mod_base = um
  modified_base 13: mod_base = OTHER; note = 2'-O-methyladenosine
  modified_base 14: mod_base = OTHER; note = 2'-fluorouridine
  modified_base 15: mod_base = OTHER; note = 2'-O-methyladenosine
  modified_base 16: mod_base = OTHER; note = 2'-fluorouridine
  modified_base 17: mod_base = cm
  modified_base 18: mod_base = cm
  modified_base 19: mod_base = OTHER; note = 2'-O-methyladenosine
  modified_base 20: mod_base = OTHER; note = 2'-O-methyladenosine
  modified_base 21: mod_base = OTHER; note = 2'-O-methyluridine with a 3'-phosphorothioate linkage
  modified_base 22: mod_base = OTHER; note = 2'-O-methyladenosine with a 3'-phosphorothioate linkage
  modified_base 23: mod_base = OTHER; note = 2'-O-methyladenosine
tgggatgggcatatatccaataa

SEQ ID NO: 2169 - RNA, 23 nt, synthetic construct
  source 1..23: mol_type = other RNA
  modified_base 1: mod_base = OTHER; note = 2'-O-methyluridine with a 3'-phosphorothioate linkage
  modified_base 2: mod_base = OTHER; note = 2'-fluoroguanosine with a 3'-phosphorothioate linkage
  modified_base 3: mod_base = gm
  modified_base 4: mod_base = cm
  modified_base 5: mod_base = OTHER; note = 2'-fluorocytidine
  modified_base 6: mod_base = OTHER; note = 2'-O-methyladenosine
  modified_base 7: mod_base = OTHER; note = 2'-fluorocytidine
  modified_base 8: mod_base = OTHER; note = 2'-O-methyladenosine
  modified_base 9: mod_base = OTHER; note = 2'-O-methyladenosine
  modified_base 10: mod_base = gm
  modified_base 11: mod_base = OTHER; note = 2'-O-methyladenosine
  modified_base 12: mod_base = cm
  modified_base 13: mod_base = OTHER; note = 2'-O-methyladenosine
  modified_base 14: mod_base = OTHER; note = 2'-fluoroadenosine
  modified_base 15: mod_base = cm
  modified_base 16: mod_base = OTHER; note = 2'-fluorocytidine
  modified_base 17: mod_base = um
  modified_base 18: mod_base = um
  modified_base 19: mod_base = cm
  modified_base 20: mod_base = um
  modified_base 21: mod_base = OTHER; note = 2'-O-methylguanosine with a 3'-phosphorothioate linkage
  modified_base 22: mod_base = OTHER; note = 2'-O-methyluridine with a 3'-phosphorothioate linkage
  modified_base 23: mod_base = um
tggccacaagacaaccttctgtt

SEQ ID NO: 2170 - RNA, 23 nt, synthetic construct
  source 1..23: mol_type = other RNA
  modified_base 1: mod_base = OTHER; note = 2'-O-methyluridine with a 3'-phosphorothioate linkage
  modified_base 2: mod_base = OTHER; note = 2'-fluorouridine with a 3'-phosphorothioate linkage
  modified_base 3: mod_base = gm
  modified_base 4: mod_base = cm
  modified_base 5: mod_base = OTHER; note = 2'-fluorouridine
  modified_base 6: mod_base = gm
  modified_base 7: mod_base = OTHER; note = 2'-fluoroguanosine
  modified_base 8: mod_base = cm
  modified_base 9: mod_base = cm
  modified_base 10: mod_base = OTHER; note = 2'-O-methyladenosine
  modified_base 11: mod_base = cm
  modified_base 12: mod_base = OTHER; note = 2'-O-methyladenosine
  modified_base 13: mod_base = OTHER; note = 2'-O-methyladenosine
  modified_base 14: mod_base = OTHER; note = 2'-fluoroguanosine
  modified_base 15: mod_base = OTHER; note = 2'-O-methyladenosine
  modified_base 16: mod_base = OTHER; note = 2'-fluorocytidine
  modified_base 17: mod_base = OTHER; note = 2'-O-methyladenosine
  modified_base 18: mod_base = OTHER; note = 2'-O-methyladenosine
  modified_base 19: mod_base = cm
  modified_base 20: mod_base = cm
  modified_base 21: mod_base = OTHER; note = 2'-O-methyluridine with a 3'-phosphorothioate linkage
  modified_base 22: mod_base = OTHER; note = 2'-O-methyluridine with a 3'-phosphorothioate linkage
  modified_base 23: mod_base = cm
ttgctggccacaagacaaccttc

SEQ ID NO: 2171 - RNA, 23 nt, synthetic construct
  source 1..23: mol_type = other RNA
  modified_base 1: mod_base = OTHER; note = 2'-O-methyluridine with a 3'-phosphorothioate linkage
  modified_base 2: mod_base = OTHER; note = 2'-fluorouridine with a 3'-phosphorothioate linkage
  modified_base 3: mod_base = gm
  modified_base 4: mod_base = gm
  modified_base 5: mod_base = OTHER; note = 2'-fluorouridine
  modified_base 6: mod_base = gm
  modified_base 7: mod_base = OTHER; note = 2'-fluorocytidine
  modified_base 8: mod_base = um
  modified_base 9: mod_base = gm
  modified_base 10: mod_base = gm
  modified_base 11: mod_base = cm
  modified_base 12: mod_base = cm
  modified_base 13: mod_base = OTHER; note = 2'-O-methyladenosine
  modified_base 14: mod_base = OTHER; note = 2'-fluorocytidine
  modified_base 15: mod_base = OTHER; note = 2'-O-methyladenosine
  modified_base 16: mod_base = OTHER; note = 2'-fluoroadenosine
  modified_base 17: mod_base = gm
  modified_base 18: mod_base = OTHER; note = 2'-O-methyladenosine
  modified_base 19: mod_base = cm
  modified_base 20: mod_base = OTHER; note = 2'-O-methyladenosine
  modified_base 21: mod_base = OTHER; note = 2'-O-methyladenosine with a 3'-phosphorothioate linkage
  modified_base 22: mod_base = OTHER; note = 2'-O-methylcytidine with a 3'-phosphorothioate linkage
  modified_base 23: mod_base = cm
ttggtgctggccacaagacaacc

SEQ ID NO: 2172 - RNA, 23 nt, synthetic construct
  source 1..23: mol_type = other RNA
  modified_base 1: mod_base = OTHER; note = 2'-O-methyluridine with a 3'-phosphorothioate linkage
  modified_base 2: mod_base = OTHER; note = 2'-fluorouridine with a 3'-phosphorothioate linkage
  modified_base 3: mod_base = um
  modified_base 4: mod_base = gm
  modified_base 5: mod_base = OTHER; note = 2'-fluoroguanosine
  modified_base 6: mod_base = um
  modified_base 7: mod_base = OTHER; note = 2'-fluoroguanosine
  modified_base 8: mod_base = cm
  modified_base 9: mod_base = um
  modified_base 10: mod_base = gm
  modified_base 11: mod_base = gm
  modified_base 12: mod_base = cm
  modified_base 13: mod_base = cm
  modified_base 14: mod_base = OTHER; note = 2'-fluoroadenosine
  modified_base 15: mod_base = cm
  modified_base 16: mod_base = OTHER; note = 2'-fluoroadenosine
  modified_base 17: mod_base = OTHER; note = 2'-O-methyladenosine
  modified_base 18: mod_base = gm
  modified_base 19: mod_base = OTHER; note = 2'-O-methyladenosine
  modified_base 20: mod_base = cm
  modified_base 21: mod_base = OTHER; note = 2'-O-methyladenosine with a 3'-phosphorothioate linkage
  modified_base 22: mod_base = OTHER; note = 2'-O-methyladenosine with a 3'-phosphorothioate linkage
  modified_base 23: mod_base = cm
tttggtgctggccacaagacaac

SEQ ID NO: 2173 - RNA, 23 nt, synthetic construct
  source 1..23: mol_type = other RNA
  modified_base 1: mod_base = OTHER; note = 2'-O-methyluridine with a 3'-phosphorothioate linkage
  modified_base 2: mod_base = OTHER; note = 2'-fluorouridine with a 3'-phosphorothioate linkage
  modified_base 3: mod_base = gm
  modified_base 4: mod_base = gm
  modified_base 5: mod_base = OTHER; note = 2'-fluorocytidine
  modified_base 6: mod_base = OTHER; note = 2'-O-methyladenosine
  modified_base 7: mod_base = OTHER; note = 2'-fluorocytidine
  modified_base 8: mod_base = cm
  modified_base 9: mod_base = um
  modified_base 10: mod_base = cm
  modified_base 11: mod_base = cm
  modified_base 12: mod_base = OTHER; note = 2'-O-methyladenosine
  modified_base 13: mod_base = cm
  modified_base 14: mod_base = OTHER; note = 2'-fluorocytidine
  modified_base 15: mod_base = OTHER; note = 2'-O-methyladenosine
  modified_base 16: mod_base = OTHER; note = 2'-fluoroadenosine
  modified_base 17: mod_base = gm
  modified_base 18: mod_base = OTHER; note = 2'-O-methyladenosine
  modified_base 19: mod_base = cm
  modified_base 20: mod_base = cm
  modified_base 21: mod_base = OTHER; note = 2'-O-methyluridine with a 3'-phosphorothioate linkage
  modified_base 22: mod_base = OTHER; note = 2'-O-methyladenosine with a 3'-phosphorothioate linkage
  modified_base 23: mod_base = um
ttggcacctccaccaagacctat

SEQ ID NO: 2174 - RNA, 23 nt, synthetic construct
  source 1..23: mol_type = other RNA
  modified_base 1: mod_base = OTHER; note = 2'-O-methyluridine with a 3'-phosphorothioate linkage
  modified_base 2: mod_base = OTHER; note = 2'-fluorocytidine with a 3'-phosphorothioate linkage
  modified_base 3: mod_base = um
  modified_base 4: mod_base = gm
  modified_base 5: mod_base = OTHER; note = 2'-fluoroguanosine
  modified_base 6: mod_base = cm
  modified_base 7: mod_base = OTHER; note = 2'-fluoroadenosine
  modified_base 8: mod_base = cm
  modified_base 9: mod_base = cm
  modified_base 10: mod_base = um
  modified_base 11: mod_base = cm
  modified_base 12: mod_base = cm
  modified_base 13: mod_base = OTHER; note = 2'-O-methyladenosine
  modified_base 14: mod_base = OTHER; note = 2'-fluorocytidine
  modified_base 15: mod_base = cm
  modified_base 16: mod_base = OTHER; note = 2'-fluoroadenosine
  modified_base 17: mod_base = OTHER; note = 2'-O-methyladenosine
  modified_base 18: mod_base = gm
  modified_base 19: mod_base = OTHER; note = 2'-O-methyladenosine
  modified_base 20: mod_base = cm
  modified_base 21: mod_base = OTHER; note = 2'-O-methylcytidine with a 3'-phosphorothioate linkage
  modified_base 22: mod_base = OTHER; note = 2'-O-methyluridine with a 3'-phosphorothioate linkage
  modified_base 23: mod_base = OTHER; note = 2'-O-methyladenosine
tctggcacctccaccaagaccta

SEQ ID NO: 2175 - RNA, 23 nt, synthetic construct
  source 1..23: mol_type = other RNA
  modified_base 1: mod_base = OTHER; note = 2'-O-methyluridine with a 3'-phosphorothioate linkage
  modified_base 2: mod_base = OTHER; note = 2'-fluorouridine with a 3'-phosphorothioate linkage
  modified_base 3: mod_base = cm
  modified_base 4: mod_base = gm
  modified_base 5: mod_base = OTHER; note = 2'-fluoroguanosine
  modified_base 6: mod_base = cm
  modified_base 7: mod_base = OTHER; note = 2'-fluorouridine
  modified_base 8: mod_base = gm
  modified_base 9: mod_base = cm
  modified_base 10: mod_base = um
  modified_base 11: mod_base = gm
  modified_base 12: mod_base = gm
  modified_base 13: mod_base = cm
  modified_base 14: mod_base = OTHER; note = 2'-fluoroadenosine
  modified_base 15: mod_base = cm
  modified_base 16: mod_base = OTHER; note = 2'-fluorocytidine
  modified_base 17: mod_base = um
  modified_base 18: mod_base = cm
  modified_base 19: mod_base = cm
  modified_base 20: mod_base = OTHER; note = 2'-O-methyladenosine
  modified_base 21: mod_base = OTHER; note = 2'-O-methylcytidine with a 3'-phosphorothioate linkage
  modified_base 22: mod_base = OTHER; note = 2'-O-methylcytidine with a 3'-phosphorothioate linkage
  modified_base 23: mod_base = OTHER; note = 2'-O-methyladenosine
ttcggctgctggcacctccacca

SEQ ID NO: 2176 - RNA, 23 nt, synthetic construct
  source 1..23: mol_type = other RNA
  modified_base 1: mod_base = OTHER; note = 2'-O-methyluridine with a 3'-phosphorothioate linkage
  modified_base 2: mod_base = OTHER; note = 2'-fluoroadenosine with a 3'-phosphorothioate linkage
  modified_base 3: mod_base = OTHER; note = 2'-O-methyladenosine
  modified_base 4: mod_base = gm
  modified_base 5: mod_base = OTHER; note = 2'-fluoroguanosine
  modified_base 6: mod_base = OTHER; note = 2'-O-methyladenosine
  modified_base 7: mod_base = OTHER; note = 2'-fluorocytidine
  modified_base 8: mod_base = um
  modified_base 9: mod_base = cm
  modified_base 10: mod_base = gm
  modified_base 11: mod_base = gm
  modified_base 12: mod_base = cm
  modified_base 13: mod_base = um
  modified_base 14: mod_base = OTHER; note = 2'-fluoroguanosine
  modified_base 15: mod_base = cm
  modified_base 16: mod_base = OTHER; note = 2'-fluorouridine
  modified_base 17: mod_base = gm
  modified_base 18: mod_base = gm
  modified_base 19: mod_base = cm
  modified_base 20: mod_base = OTHER; note = 2'-O-methyladenosine
  modified_base 21: mod_base = OTHER; note = 2'-O-methylcytidine with a 3'-phosphorothioate linkage
  modified_base 22: mod_base = OTHER; note = 2'-O-methylcytidine with a 3'-phosphorothioate linkage
  modified_base 23: mod_base = um
taaggactcggctgctggcacct

SEQ ID NO: 2177 - RNA, 23 nt, synthetic construct
  source 1..23: mol_type = other RNA
  modified_base 1: mod_base = OTHER; note = 2'-O-methyluridine with a 3'-phosphorothioate linkage
  modified_base 2: mod_base = OTHER; note = 2'-fluorocytidine with a 3'-phosphorothioate linkage
  modified_base 3: mod_base = um
  modified_base 4: mod_base = gm
  modified_base 5: mod_base = OTHER; note = 2'-fluorocytidine
  modified_base 6: mod_base = OTHER; note = 2'-O-methyladenosine
  modified_base 7: mod_base = OTHER; note = 2'-fluoroadenosine
  modified_base 8: mod_base = gm
  modified_base 9: mod_base = gm
  modified_base 10: mod_base = OTHER; note = 2'-O-methyladenosine
  modified_base 11: mod_base = cm
  modified_base 12: mod_base = um
  modified_base 13: mod_base = cm
  modified_base 14: mod_base = OTHER; note = 2'-fluoroguanosine
  modified_base 15: mod_base = gm
  modified_base 16: mod_base = OTHER; note = 2'-fluorocytidine
  modified_base 17: mod_base = um
  modified_base 18: mod_base = gm
  modified_base 19: mod_base = cm
  modified_base 20: mod_base = um
  modified_base 21: mod_base = OTHER; note = 2'-O-methylguanosine with a 3'-phosphorothioate linkage
  modified_base 22: mod_base = OTHER; note = 2'-O-methylguanosine with a 3'-phosphorothioate linkage
  modified_base 23: mod_base = cm
tctgcaaggactcggctgctggc

SEQ ID NO: 2178 - RNA, 23 nt, synthetic construct
  source 1..23: mol_type = other RNA
  modified_base 1: mod_base = OTHER; note = 2'-O-methyluridine with a 3'-phosphorothioate linkage
  modified_base 2: mod_base = OTHER; note = 2'-fluorouridine with a 3'-phosphorothioate linkage
  modified_base 3: mod_base = cm
  modified_base 4: mod_base = um
  modified_base 5: mod_base = OTHER; note = 2'-fluoroguanosine
  modified_base 6: mod_base = cm
  modified_base 7: mod_base = OTHER; note = 2'-fluoroadenosine
  modified_base 8: mod_base = OTHER; note = 2'-O-methyladenosine
  modified_base 9: mod_base = gm
  modified_base 10: mod_base = gm
  modified_base 11: mod_base = OTHER; note = 2'-O-methyladenosine
  modified_base 12: mod_base = cm
  modified_base 13: mod_base = um
  modified_base 14: mod_base = OTHER; note = 2'-fluorocytidine
  modified_base 15: mod_base = gm
  modified_base 16: mod_base = OTHER; note = 2'-fluoroguanosine
  modified_base 17: mod_base = cm
  modified_base 18: mod_base = um
  modified_base 19: mod_base = gm
  modified_base 20: mod_base = cm
  modified_base 21: mod_base = OTHER; note = 2'-O-methyluridine with a 3'-phosphorothioate linkage
  modified_base 22: mod_base = OTHER; note = 2'-O-methylguanosine with a 3'-phosphorothioate linkage
  modified_base 23: mod_base = gm
ttctgcaaggactcggctgctgg

SEQ ID NO: 2179 - RNA, 23 nt, synthetic construct
  source 1..23: mol_type = other RNA
  modified_base 1: mod_base = OTHER; note = 2'-O-methyluridine with a 3'-phosphorothioate linkage
  modified_base 2: mod_base = OTHER; note = 2'-fluoroadenosine with a 3'-phosphorothioate linkage
  modified_base 3: mod_base = um
  modified_base 4: mod_base = cm
  modified_base 5: mod_base = OTHER; note = 2'-fluorouridine
  modified_base 6: mod_base = gm
  modified_base 7: mod_base = OTHER; note = 2'-fluorocytidine
  modified_base 8: mod_base = OTHER; note = 2'-O-methyladenosine
  modified_base 9: mod_base = OTHER; note = 2'-O-methyladenosine
  modified_base 10: mod_base = gm
  modified_base 11: mod_base = gm
  modified_base 12: mod_base = OTHER; note = 2'-O-methyladenosine
  modified_base 13: mod_base = cm
  modified_base 14: mod_base = OTHER; note = 2'-fluorouridine
  modified_base 15: mod_base = cm
  modified_base 16: mod_base = OTHER; note = 2'-fluoroguanosine
  modified_base 17: mod_base = gm
  modified_base 18: mod_base = cm
  modified_base 19: mod_base = um
  modified_base 20: mod_base = gm
  modified_base 21: mod_base = OTHER; note = 2'-O-methylcytidine with a 3'-phosphorothioate linkage
  modified_base 22: mod_base = OTHER; note = 2'-O-methyluridine with a 3'-phosphorothioate linkage
  modified_base 23: mod_base = gm
tatctgcaaggactcggctgctg

SEQ ID NO: 2180 - RNA, 23 nt, synthetic construct
  source 1..23: mol_type = other RNA
  modified_base 1: mod_base = OTHER; note = 2'-O-methyluridine with a 3'-phosphorothioate linkage
  modified_base 2: mod_base = OTHER; note = 2'-fluorocytidine with a 3'-phosphorothioate linkage
  modified_base 3: mod_base = OTHER; note = 2'-O-methyladenosine
  modified_base 4: mod_base = um
  modified_base 5: mod_base = OTHER; note = 2'-fluorocytidine
  modified_base 6: mod_base = um
  modified_base 7: mod_base = OTHER; note = 2'-fluoroguanosine
  modified_base 8: mod_base = cm
  modified_base 9: mod_base = OTHER; note = 2'-O-methyladenosine
  modified_base 10: mod_base = OTHER; note = 2'-O-methyladenosine
  modified_base 11: mod_base = gm
  modified_base 12: mod_base = gm
  modified_base 13: mod_base = OTHER; note = 2'-O-methyladenosine
  modified_base 14: mod_base = OTHER; note = 2'-fluorocytidine
  modified_base 15: mod_base = um
  modified_base 16: mod_base = OTHER; note = 2'-fluorocytidine
  modified_base 17: mod_base = gm
  modified_base 18: mod_base = gm
  modified_base 19: mod_base = cm
  modified_base 20: mod_base = um
  modified_base 21: mod_base = OTHER; note = 2'-O-methylguanosine with a 3'-phosphorothioate linkage
  modified_base 22: mod_base = OTHER; note = 2'-O-methylcytidine with a 3'-phosphorothioate linkage
  modified_base 23: mod_base = um
tcatctgcaaggactcggctgct

SEQ ID NO: 2181 - RNA, 23 nt, synthetic construct
  source 1..23: mol_type = other RNA
  modified_base 1: mod_base = OTHER; note = 2'-O-methyluridine with a 3'-phosphorothioate linkage
  modified_base 2: mod_base = OTHER; note = 2'-fluorocytidine with a 3'-phosphorothioate linkage
  modified_base 3: mod_base = cm
  modified_base 4: mod_base = cm
  modified_base 5: mod_base = OTHER; note = 2'-fluoroadenosine
  modified_base 6: mod_base = um
  modified_base 7: mod_base = OTHER; note = 2'-fluorocytidine
  modified_base 8: mod_base = um
  modified_base 9: mod_base = gm
  modified_base 10: mod_base = cm
  modified_base 11: mod_base = OTHER; note = 2'-O-methyladenosine
  modified_base 12: mod_base = OTHER; note = 2'-O-methyladenosine
  modified_base 13: mod_base = gm
  modified_base 14: mod_base = OTHER; note = 2'-fluoroguanosine
  modified_base 15: mod_base = OTHER; note = 2'-O-methyladenosine
  modified_base 16: mod_base = OTHER; note = 2'-fluorocytidine
  modified_base 17: mod_base = um
  modified_base 18: mod_base = cm
  modified_base 19: mod_base = gm
  modified_base 20: mod_base = gm
  modified_base 21: mod_base = OTHER; note = 2'-O-methylcytidine with a 3'-phosphorothioate linkage
  modified_base 22: mod_base = OTHER; note = 2'-O-methyluridine with a 3'-phosphorothioate linkage
  modified_base 23: mod_base = gm
tcccatctgcaaggactcggctg

SEQ ID NO: 2182 - RNA, 23 nt, synthetic construct
  source 1..23: mol_type = other RNA
  modified_base 1: mod_base = OTHER; note = 2'-O-methyluridine with a 3'-phosphorothioate linkage
  modified_base 2: mod_base = OTHER; note = 2'-fluoroadenosine with a 3'-phosphorothioate linkage
  modified_base 3: mod_base = um
  modified_base 4: mod_base = cm
  modified_base 5: mod_base = OTHER; note = 2'-fluorocytidine
  modified_base 6: mod_base = cm
  modified_base 7: mod_base = OTHER; note = 2'-fluoroadenosine
  modified_base 8: mod_base = um
  modified_base 9: mod_base = cm
  modified_base 10: mod_base = um
  modified_base 11: mod_base = gm
  modified_base 12: mod_base = cm
  modified_base 13: mod_base = OTHER; note = 2'-O-methyladenosine
  modified_base 14: mod_base = OTHER; note = 2'-fluoroadenosine
  modified_base 15: mod_base = gm
  modified_base 16: mod_base = OTHER; note = 2'-fluoroguanosine
  modified_base 17: mod_base = OTHER; note = 2'-O-methyladenosine
  modified_base 18: mod_base = cm
  modified_base 19: mod_base = um
  modified_base 20: mod_base = cm
  modified_base 21: mod_base = OTHER; note = 2'-O-methylguanosine with a 3'-phosphorothioate linkage
  modified_base 22: mod_base = OTHER; note = 2'-O-methylguanosine with a 3'-phosphorothioate linkage
  modified_base 23: mod_base = cm
tatcccatctgcaaggactcggc

SEQ ID NO: 2183 - RNA, 23 nt, synthetic construct
  source 1..23: mol_type = other RNA
  modified_base 1: mod_base = OTHER; note = 2'-O-methyluridine with a 3'-phosphorothioate linkage
  modified_base 2: mod_base = OTHER; note = 2'-fluoroadenosine with a 3'-phosphorothioate linkage
  modified_base 3: mod_base = cm
  modified_base 4: mod_base = gm
  modified_base 5: mod_base = OTHER; note = 2'-fluoroadenosine
  modified_base 6: mod_base = gm
  modified_base 7: mod_base = OTHER; note = 2'-fluorouridine
  modified_base 8: mod_base = cm
  modified_base 9: mod_base = OTHER; note = 2'-O-methyladenosine
  modified_base 10: mod_base = um
  modified_base 11: mod_base = cm
  modified_base 12: mod_base = cm
  modified_base 13: mod_base = cm
  modified_base 14: mod_base = OTHER; note = 2'-fluoroadenosine
  modified_base 15: mod_base = um
  modified_base 16: mod_base = OTHER; note = 2'-fluorocytidine
  modified_base 17: mod_base = um
  modified_base 18: mod_base = gm
  modified_base 19: mod_base = cm
  modified_base 20: mod_base = OTHER; note = 2'-O-methyladenosine
  modified_base 21: mod_base = OTHER; note = 2'-O-methyladenosine with a 3'-phosphorothioate linkage
  modified_base 22: mod_base = OTHER; note = 2'-O-methylguanosine with a 3'-phosphorothioate linkage
  modified_base 23: mod_base = gm
tacgagtcatcccatctgcaagg

SEQ ID NO: 2184 - RNA, 23 nt, synthetic construct
  source 1..23: mol_type = other RNA
  modified_base 1: mod_base = OTHER; note = 2'-O-methyluridine with a 3'-phosphorothioate linkage
  modified_base 2: mod_base = OTHER; note = 2'-fluorocytidine with a 3'-phosphorothioate linkage
  modified_base 3: mod_base = OTHER; note = 2'-O-methyladenosine
  modified_base 4: mod_base = cm
  modified_base 5: mod_base = OTHER; note = 2'-fluoroguanosine
  modified_base 6: mod_base = OTHER; note = 2'-O-methyladenosine
  modified_base 7: mod_base = OTHER; note = 2'-fluoroguanosine
  modified_base 8: mod_base = um
  modified_base 9: mod_base = cm
  modified_base 10: mod_base = OTHER; note = 2'-O-methyladenosine
  modified_base 11: mod_base = um
  modified_base 12: mod_base = cm
  modified_base 13: mod_base = cm
  modified_base 14: mod_base = OTHER; note = 2'-fluorocytidine
  modified_base 15: mod_base = OTHER; note = 2'-O-methyladenosine
  modified_base 16: mod_base = OTHER; note = 2'-fluorouridine
  modified_base 17: mod_base = cm
  modified_base 18: mod_base = um
  modified_base 19: mod_base = gm
  modified_base 20: mod_base = cm
  modified_base 21: mod_base = OTHER; note = 2'-O-methyladenosine with a 3'-phosphorothioate linkage
  modified_base 22: mod_base = OTHER; note = 2'-O-methyladenosine with a 3'-phosphorothioate linkage
  modified_base 23: mod_base = gm
tcacgagtcatcccatctgcaag

SEQ ID NO: 2185 - RNA, 23 nt, synthetic construct
  source 1..23: mol_type = other RNA
  modified_base 1: mod_base = OTHER; note = 2'-O-methyluridine with a 3'-phosphorothioate linkage
  modified_base 2: mod_base = OTHER; note = 2'-fluorocytidine with a 3'-phosphorothioate linkage
  modified_base 3: mod_base = cm
  modified_base 4: mod_base = OTHER; note = 2'-O-methyladenosine
  modified_base 5: mod_base = OTHER; note = 2'-fluorocytidine
  modified_base 6: mod_base = gm
  modified_base 7: mod_base = OTHER; note = 2'-fluoroadenosine
  modified_base 8: mod_base = gm
  modified_base 9: mod_base = um
  modified_base 10: mod_base = cm
  modified_base 11: mod_base = OTHER; note = 2'-O-methyladenosine
  modified_base 12: mod_base = um
  modified_base 13: mod_base = cm
  modified_base 14: mod_base = OTHER; note = 2'-fluorocytidine
  modified_base 15: mod_base = cm
  modified_base 16: mod_base = OTHER; note = 2'-fluoroadenosine
  modified_base 17: mod_base = um
  modified_base 18: mod_base = cm
  modified_base 19: mod_base = um
  modified_base 20: mod_base = gm
  modified_base 21: mod_base = OTHER; note = 2'-O-methylcytidine with a 3'-phosphorothioate linkage
  modified_base 22: mod_base = OTHER; note = 2'-O-methyladenosine with a 3'-phosphorothioate linkage
  modified_base 23: mod_base = OTHER; note = 2'-O-methyladenosine
tccacgagtcatcccatctgcaa

SEQ ID NO: 2186 - RNA, 23 nt, synthetic construct
  source 1..23: mol_type = other RNA
  modified_base 1: mod_base = OTHER; note = 2'-O-methyluridine with a 3'-phosphorothioate linkage
  modified_base 2: mod_base = OTHER; note = 2'-fluoroguanosine with a 3'-phosphorothioate linkage
  modified_base 3: mod_base = cm
  modified_base 4: mod_base = cm
  modified_base 5: mod_base = OTHER; note = 2'-fluoroadenosine
  modified_base 6: mod_base = cm
  modified_base 7: mod_base = OTHER; note = 2'-fluoroguanosine
  modified_base 8: mod_base = OTHER; note = 2'-O-methyladenosine
  modified_base 9: mod_base = gm
  modified_base 10: mod_base = um
  modified_base 11: mod_base = cm
  modified_base 12: mod_base = OTHER; note = 2'-O-methyladenosine
  modified_base 13: mod_base = um
  modified_base 14: mod_base = OTHER; note = 2'-fluorocytidine
  modified_base 15: mod_base = cm
  modified_base 16: mod_base = OTHER; note = 2'-fluorocytidine
  modified_base 17: mod_base = OTHER; note = 2'-O-methyladenosine
  modified_base 18: mod_base = um
  modified_base 19: mod_base = cm
  modified_base 20: mod_base = um
  modified_base 21: mod_base = OTHER; note = 2'-O-methylguanosine with a 3'-phosphorothioate linkage
  modified_base 22: mod_base = OTHER; note = 2'-O-methylcytidine with a 3'-phosphorothioate linkage
  modified_base 23: mod_base = OTHER; note = 2'-O-methyladenosine
tgccacgagtcatcccatctgca

SEQ ID NO: 2187 - RNA, 23 nt, synthetic construct
  source 1..23: mol_type = other RNA
  modified_base 1: mod_base = OTHER; note = 2'-O-methyluridine with a 3'-phosphorothioate linkage
  modified_base 2: mod_base = OTHER; note = 2'-fluoroguanosine with a 3'-phosphorothioate linkage
  modified_base 3: mod_base = gm
  modified_base 4: mod_base = cm
  modified_base 5: mod_base = OTHER; note = 2'-fluorocytidine
  modified_base 6: mod_base = OTHER; note = 2'-O-methyladenosine
  modified_base 7: mod_base = OTHER; note = 2'-fluorocytidine
  modified_base 8: mod_base = gm
  modified_base 9: mod_base = OTHER; note = 2'-O-methyladenosine
  modified_base 10: mod_base = gm
  modified_base 11: mod_base = um
  modified_base 12: mod_base = cm
  modified_base 13: mod_base = OTHER; note = 2'-O-methyladenosine
  modified_base 14: mod_base = OTHER; note = 2'-fluorouridine
  modified_base 15: mod_base = cm
  modified_base 16: mod_base = OTHER; note = 2'-fluorocytidine
  modified_base 17: mod_base = cm
  modified_base 18: mod_base = OTHER; note = 2'-O-methyladenosine
  modified_base 19: mod_base = um
  modified_base 20: mod_base = cm
  modified_base 21: mod_base = OTHER; note = 2'-O-methyluridine with a 3'-phosphorothioate linkage
  modified_base 22: mod_base = OTHER; note = 2'-O-methylguanosine with a 3'-phosphorothioate linkage
  modified_base 23: mod_base = cm
tggccacgagtcatcccatctgc

SEQ ID NO: 2188 - RNA, 23 nt, synthetic construct
  source 1..23: mol_type = other RNA
  modified_base 1: mod_base = OTHER; note = 2'-O-methyluridine with a 3'-phosphorothioate linkage
  modified_base 2: mod_base = OTHER; note = 2'-fluoroguanosine with a 3'-phosphorothioate linkage
  modified_base 3: mod_base = gm
  modified_base 4: mod_base = gm
  modified_base 5: mod_base = OTHER; note = 2'-fluorocytidine
  modified_base 6: mod_base = cm
  modified_base 7: mod_base = OTHER; note = 2'-fluoroadenosine
  modified_base 8: mod_base = cm
  modified_base 9: mod_base = gm
  modified_base 10: mod_base = OTHER; note = 2'-O-methyladenosine
  modified_base 11: mod_base = gm
  modified_base 12: mod_base = um
  modified_base 13: mod_base = cm
  modified_base 14: mod_base = OTHER; note = 2'-fluoroadenosine
  modified_base 15: mod_base = um
  modified_base 16: mod_base = OTHER; note = 2'-fluorocytidine
  modified_base 17: mod_base = cm
  modified_base 18: mod_base = cm
  modified_base 19: mod_base = OTHER; note = 2'-O-methyladenosine
  modified_base 20: mod_base = um
  modified_base 21: mod_base = OTHER; note = 2'-O-methylcytidine with a 3'-phosphorothioate linkage
  modified_base 22: mod_base = OTHER; note = 2'-O-methyluridine with a 3'-phosphorothioate linkage
  modified_base 23: mod_base = gm
tgggccacgagtcatcccatctg

SEQ ID NO: 2189 - RNA, 23 nt, synthetic construct
  source 1..23: mol_type = other RNA
  modified_base 1: mod_base = OTHER; note = 2'-O-methyluridine with a 3'-phosphorothioate linkage
  modified_base 2: mod_base = OTHER; note = 2'-fluorouridine with a 3'-phosphorothioate linkage
  modified_base 3: mod_base = gm
  modified_base 4: mod_base = gm
  modified_base 5: mod_base = OTHER; note = 2'-fluoroguanosine
  modified_base 6: mod_base = cm
  modified_base 7: mod_base = OTHER; note = 2'-fluorocytidine
  modified_base 8: mod_base = OTHER; note = 2'-O-methyladenosine
  modified_base 9: mod_base = cm
  modified_base 10: mod_base = gm
  modified_base 11: mod_base = OTHER; note = 2'-O-methyladenosine
  modified_base 12: mod_base = gm
  modified_base 13: mod_base = um
  modified_base 14: mod_base = OTHER; note = 2'-fluorocytidine
  modified_base 15: mod_base = OTHER; note = 2'-O-methyladenosine
  modified_base 16: mod_base = OTHER; note = 2'-fluorouridine
  modified_base 17: mod_base = cm
  modified_base 18: mod_base = cm
  modified_base 19: mod_base = cm
  modified_base 20: mod_base = OTHER; note = 2'-O-methyladenosine
  modified_base 21: mod_base = OTHER; note = 2'-O-methyluridine with a 3'-phosphorothioate linkage
  modified_base 22: mod_base = OTHER; note = 2'-O-methylcytidine with a 3'-phosphorothioate linkage
  modified_base 23: mod_base = um
ttgggccacgagtcatcccatct

SEQ ID NO: 2190 - RNA, 23 nt, synthetic construct
  source 1..23: mol_type = other RNA
  modified_base 1: mod_base = OTHER; note = 2'-O-methyluridine with a 3'-phosphorothioate linkage
  modified_base 2: mod_base = OTHER; note = 2'-fluorocytidine with a 3'-phosphorothioate linkage
  modified_base 3: mod_base = um
  modified_base 4: mod_base = gm
  modified_base 5: mod_base = OTHER; note = 2'-fluoroguanosine
  modified_base 6: mod_base = gm
  modified_base 7: mod_base = OTHER; note = 2'-fluorocytidine
  modified_base 8: mod_base = cm
  modified_base 9: mod_base = OTHER; note = 2'-O-methyladenosine
  modified_base 10: mod_base = cm
  modified_base 11: mod_base = gm
  modified_base 12: mod_base = OTHER; note = 2'-O-methyladenosine
  modified_base 13: mod_base = gm
  modified_base 14: mod_base = OTHER; note = 2'-fluorouridine
  modified_base 15: mod_base = cm
  modified_base 16: mod_base = OTHER; note = 2'-fluoroadenosine
  modified_base 17: mod_base = um
  modified_base 18: mod_base = cm
  modified_base 19: mod_base = cm
  modified_base 20: mod_base = cm
  modified_base 21: mod_base = OTHER; note = 2'-O-methyladenosine with a 3'-phosphorothioate linkage
  modified_base 22: mod_base = OTHER; note = 2'-O-methyluridine with a 3'-phosphorothioate linkage
  modified_base 23: mod_base = cm
tctgggccacgagtcatcccatc

SEQ ID NO: 2191 - RNA, 23 nt, synthetic construct
  source 1..23: mol_type = other RNA
  modified_base 1: mod_base = OTHER; note = 2'-O-methyluridine with a 3'-phosphorothioate linkage
  modified_base 2: mod_base = OTHER; note = 2'-fluoroadenosine with a 3'-phosphorothioate linkage
  modified_base 3: mod_base = cm
  modified_base 4: mod_base = um
  modified_base 5: mod_base = OTHER; note = 2'-fluoroguanosine
  modified_base 6: mod_base = gm
  modified_base 7: mod_base = OTHER; note = 2'-fluoroguanosine
  modified_base 8: mod_base = cm
  modified_base 9: mod_base = cm
  modified_base 10: mod_base = OTHER; note = 2'-O-methyladenosine
  modified_base 11: mod_base = cm
  modified_base 12: mod_base = gm
  modified_base 13: mod_base = OTHER; note = 2'-O-methyladenosine
  modified_base 14: mod_base = OTHER; note = 2'-fluoroguanosine
  modified_base 15: mod_base = um
  modified_base 16: mod_base = OTHER; note = 2'-fluorocytidine
  modified_base 17: mod_base = OTHER; note = 2'-O-methyladenosine
  modified_base 18: mod_base = um
  modified_base 19: mod_base = cm
  modified_base 20: mod_base = cm
  modified_base 21: mod_base = OTHER; note = 2'-O-methylcytidine with a 3'-phosphorothioate linkage
  modified_base 22: mod_base = OTHER; note = 2'-O-methyladenosine with a 3'-phosphorothioate linkage
  modified_base 23: mod_base = um
tactgggccacgagtcatcccat

SEQ ID NO: 2192 - RNA, 23 nt, synthetic construct
  source 1..23: mol_type = other RNA
  modified_base 1: mod_base = OTHER; note = 2'-O-methyluridine with a 3'-phosphorothioate linkage
  modified_base 2: mod_base = OTHER; note = 2'-fluoroadenosine with a 3'-phosphorothioate linkage
  modified_base 3: mod_base = OTHER; note = 2'-O-methyladenosine
  modified_base 4: mod_base = gm
  modified_base 5: mod_base = OTHER; note = 2'-fluoroadenosine
  modified_base 6: mod_base = cm
  modified_base 7: mod_base = OTHER; note = 2'-fluoroguanosine
  modified_base 8: mod_base = cm
  modified_base 9: mod_base = OTHER; note = 2'-O-methyladenosine
  modified_base 10: mod_base = cm
  modified_base 11: mod_base = OTHER; note = 2'-O-methyladenosine
  modified_base 12: mod_base = OTHER; note = 2'-O-methyladenosine
  modified_base 13: mod_base = cm
  modified_base 14: mod_base = OTHER; note = 2'-fluorouridine
  modified_base 15: mod_base = gm
  modified_base 16: mod_base = OTHER; note = 2'-fluoroguanosine
  modified_base 17: mod_base = gm
  modified_base 18: mod_base = cm
  modified_base 19: mod_base = cm
  modified_base 20: mod_base = OTHER; note = 2'-O-methyladenosine
  modified_base 21: mod_base = OTHER; note = 2'-O-methylcytidine with a 3'-phosphorothioate linkage
  modified_base 22: mod_base = OTHER; note = 2'-O-methylguanosine with a 3'-phosphorothioate linkage
  modified_base 23: mod_base = OTHER; note = 2'-O-methyladenosine
taagacgcacaactgggccacga

SEQ ID NO: 2193 - RNA, 23 nt, synthetic construct
  source 1..23: mol_type = other RNA
  modified_base 1: mod_base = OTHER; note = 2'-O-methyluridine with a 3'-phosphorothioate linkage
  modified_base 2: mod_base = OTHER; note = 2'-fluoroguanosine with a 3'-phosphorothioate linkage
  modified_base 3: mod_base = OTHER; note = 2'-O-methyladenosine
  modified_base 4: mod_base = OTHER; note = 2'-O-methyladenosine
  modified_base 5: mod_base = OTHER; note = 2'-fluoroguanosine
  modified_base 6: mod_base = OTHER; note = 2'-O-methyladenosine
  modified_base 7: mod_base = OTHER; note = 2'-fluorocytidine
  modified_base 8: mod_base = gm
  modified_base 9: mod_base = cm
  modified_base 10: mod_base = OTHER; note = 2'-O-methyladenosine
  modified_base 11: mod_base = cm
  modified_base 12: mod_base = OTHER; note = 2'-O-methyladenosine
  modified_base 13: mod_base = OTHER; note = 2'-O-methyladenosine
  modified_base 14: mod_base = OTHER; note = 2'-fluorocytidine
  modified_base 15: mod_base = um
  modified_base 16: mod_base = OTHER; note = 2'-fluoroguanosine
  modified_base 17: mod_base = gm
  modified_base 18: mod_base = gm
  modified_base 19: mod_base = cm
  modified_base 20: mod_base = cm
  modified_base 21: mod_base = OTHER; note = 2'-O-methyladenosine with a 3'-phosphorothioate linkage
  modified_base 22: mod_base = OTHER; note = 2'-O-methylcytidine with a 3'-phosphorothioate linkage
  modified_base 23: mod_base = gm
tgaagacgcacaactgggccacg

SEQ ID NO: 2194 - RNA, 23 nt, synthetic construct
  source 1..23: mol_type = other RNA
  modified_base 1: mod_base = OTHER; note = 2'-O-methyluridine with a 3'-phosphorothioate linkage
  modified_base 2: mod_base = OTHER; note = 2'-fluorouridine with a 3'-phosphorothioate linkage
  modified_base 3: mod_base = gm
  modified_base 4: mod_base = gm
  modified_base 5: mod_base = OTHER; note = 2'-fluoroadenosine
  modified_base 6: mod_base = OTHER; note = 2'-O-methyladenosine
  modified_base 7: mod_base = OTHER; note = 2'-fluoroguanosine
  modified_base 8: mod_base = OTHER; note = 2'-O-methyladenosine
  modified_base 9: mod_base = cm
  modified_base 10: mod_base = gm
  modified_base 11: mod_base = cm
  modified_base 12: mod_base = OTHER; note = 2'-O-methyladenosine
  modified_base 13: mod_base = cm
  modified_base 14: mod_base = OTHER; note = 2'-fluoroadenosine
  modified_base 15: mod_base = OTHER; note = 2'-O-methyladenosine
  modified_base 16: mod_base = OTHER; note = 2'-fluorocytidine
  modified_base 17: mod_base = um
  modified_base 18: mod_base = gm
  modified_base 19: mod_base = gm
  modified_base 20: mod_base = gm
  modified_base 21: mod_base = OTHER; note = 2'-O-methylcytidine with a 3'-phosphorothioate linkage
  modified_base 22: mod_base = OTHER; note = 2'-O-methylcytidine with a 3'-phosphorothioate linkage
  modified_base 23: mod_base = OTHER; note = 2'-O-methyladenosine
ttggaagacgcacaactgggcca

SEQ ID NO: 2195 - RNA, 23 nt, synthetic construct
  source 1..23: mol_type = other RNA
  modified_base 1: mod_base = OTHER; note = 2'-O-methyluridine with a 3'-phosphorothioate linkage
  modified_base 2: mod_base = OTHER; note = 2'-fluoroguanosine with a 3'-phosphorothioate linkage
  modified_base 3: mod_base = um
  modified_base 4: mod_base = gm
  modified_base 5: mod_base = OTHER; note = 2'-fluoroguanosine
  modified_base 6: mod_base = OTHER; note = 2'-O-methyladenosine
  modified_base 7: mod_base = OTHER; note = 2'-fluoroadenosine
  modified_base 8: mod_base = gm
  modified_base 9: mod_base = OTHER; note = 2'-O-methyladenosine
  modified_base 10: mod_base = cm
  modified_base 11: mod_base = gm
  modified_base 12: mod_base = cm
  modified_base 13: mod_base = OTHER; note = 2'-O-methyladenosine
  modified_base 14: mod_base = OTHER; note = 2'-fluorocytidine
  modified_base 15: mod_base = OTHER; note = 2'-O-methyladenosine
  modified_base 16: mod_base = OTHER; note = 2'-fluoroadenosine
  modified_base 17: mod_base = cm
  modified_base 18: mod_base = um
  modified_base 19: mod_base = gm
  modified_base 20: mod_base = gm
  modified_base 21: mod_base = OTHER; note = 2'-O-methylguanosine with a 3'-phosphorothioate linkage
  modified_base 22: mod_base = OTHER; note = 2'-O-methylcytidine with a 3'-phosphorothioate linkage
  modified_base 23: mod_base = cm
tgtggaagacgcacaactgggcc

SEQ ID NO: 2196 - RNA, 23 nt, synthetic construct
  source 1..23: mol_type = other RNA
  modified_base 1: mod_base = OTHER; note = 2'-O-methyluridine with a 3'-phosphorothioate linkage
  modified_base 2: mod_base = OTHER; note = 2'-fluorocytidine with a 3'-phosphorothioate linkage
  modified_base 3: mod_base = gm
  modified_base 4: mod_base = um
  modified_base 5: mod_base = OTHER; note = 2'-fluoroguanosine
  modified_base 6: mod_base = gm
  modified_base 7: mod_base = OTHER; note = 2'-fluoroadenosine
  modified_base 8: mod_base = OTHER; note = 2'-O-methyladenosine
  modified_base 9: mod_base = gm
  modified_base 10: mod_base = OTHER; note = 2'-O-methyladenosine
  modified_base 11: mod_base = cm
  modified_base 12: mod_base = gm
  modified_base 13: mod_base = cm
  modified_base 14: mod_base = OTHER; note = 2'-fluoroadenosine
  modified_base 15: mod_base = cm
  modified_base 16: mod_base = OTHER; note = 2'-fluoroadenosine
  modified_base 17: mod_base = OTHER; note = 2'-O-methyladenosine
  modified_base 18: mod_base = cm
  modified_base 19: mod_base = um
  modified_base 20: mod_base = gm
  modified_base 21: mod_base = OTHER; note = 2'-O-methylguanosine with a 3'-phosphorothioate linkage
  modified_base 22: mod_base = OTHER; note = 2'-O-methylguanosine with a 3'-phosphorothioate linkage
  modified_base 23: mod_base = cm
tcgtggaagacgcacaactgggc

SEQ ID NO: 2197 - RNA, 23 nt, synthetic construct
  source 1..23: mol_type = other RNA
  modified_base 1: mod_base = OTHER; note = 2'-O-methyluridine with a 3'-phosphorothioate linkage
  modified_base 2: mod_base = OTHER; note = 2'-fluoroadenosine with a 3'-phosphorothioate linkage
  modified_base 3: mod_base = cm
  modified_base 4: mod_base = gm
  modified_base 5: mod_base = OTHER; note = 2'-fluorouridine
  modified_base 6: mod_base = gm
  modified_base 7: mod_base = OTHER; note = 2'-fluoroguanosine
  modified_base 8: mod_base = OTHER; note = 2'-O-methyladenosine
  modified_base 9: mod_base = OTHER; note = 2'-O-methyladenosine
  modified_base 10: mod_base = gm
  modified_base 11: mod_base = OTHER; note = 2'-O-methyladenosine
  modified_base 12: mod_base = cm
  modified_base 13: mod_base = gm
  modified_base 14: mod_base = OTHER; note = 2'-fluorocytidine
  modified_base 15: mod_base = OTHER; note = 2'-O-methyladenosine
  modified_base 16: mod_base = OTHER; note = 2'-fluorocytidine
  modified_base 17: mod_base = OTHER; note = 2'-O-methyladenosine
  modified_base 18: mod_base = OTHER; note = 2'-O-methyladenosine
  modified_base 19: mod_base = cm
  modified_base 20: mod_base = um
  modified_base 21: mod_base = OTHER; note = 2'-O-methylguanosine with a 3'-phosphorothioate linkage
  modified_base 22: mod_base = OTHER; note = 2'-O-methylguanosine with a 3'-phosphorothioate linkage
  modified_base 23: mod_base = gm
tacgtggaagacgcacaactggg

SEQ ID NO: 2198 - RNA, 23 nt, synthetic construct
  source 1..23: mol_type = other RNA
  modified_base 1: mod_base = OTHER; note = 2'-O-methyluridine with a 3'-phosphorothioate linkage
  modified_base 2: mod_base = OTHER; note = 2'-fluorocytidine with a 3'-phosphorothioate linkage
  modified_base 3: mod_base = OTHER; note = 2'-O-methyladenosine
  modified_base 4: mod_base = cm
  modified_base 5: mod_base = OTHER; note = 2'-fluoroguanosine
  modified_base 6: mod_base = um
  modified_base 7: mod_base = OTHER; note = 2'-fluoroguanosine
  modified_base 8: mod_base = gm
  modified_base 9: mod_base = OTHER; note = 2'-O-methyladenosine
  modified_base 10: mod_base = OTHER; note = 2'-O-methyladenosine
  modified_base 11: mod_base = gm
  modified_base 12: mod_base = OTHER; note = 2'-O-methyladenosine
  modified_base 13: mod_base = cm
  modified_base 14: mod_base = OTHER; note = 2'-fluoroguanosine
  modified_base 15: mod_base = cm
  modified_base 16: mod_base = OTHER; note = 2'-fluoroadenosine
  modified_base 17: mod_base = cm
  modified_base 18: mod_base = OTHER; note = 2'-O-methyladenosine
  modified_base 19: mod_base = OTHER; note = 2'-O-methyladenosine
  modified_base 20: mod_base = cm
  modified_base 21: mod_base = OTHER; note = 2'-O-methyluridine with a 3'-phosphorothioate linkage
  modified_base 22: mod_base = OTHER; note = 2'-O-methylguanosine with a 3'-phosphorothioate linkage
  modified_base 23: mod_base = gm
tcacgtggaagacgcacaactgg

SEQ ID NO: 2199 - RNA, 23 nt, synthetic construct
  source 1..23: mol_type = other RNA
  modified_base 1: mod_base = OTHER; note = 2'-O-methyluridine with a 3'-phosphorothioate linkage
  modified_base 2: mod_base = OTHER; note = 2'-fluorouridine with a 3'-phosphorothioate linkage
  modified_base 3: mod_base = cm
  modified_base 4: mod_base = OTHER; note = 2'-O-methyladenosine
  modified_base 5: mod_base = OTHER; note = 2'-fluorocytidine
  modified_base 6: mod_base = um
  modified_base 7: mod_base = OTHER; note = 2'-fluorouridine
  modified_base 8: mod_base = cm
  modified_base 9: mod_base = um
  modified_base 10: mod_base = gm
  modified_base 11: mod_base = cm
  modified_base 12: mod_base = OTHER; note = 2'-O-methyladenosine
  modified_base 13: mod_base = gm
  modified_base 14: mod_base = OTHER; note = 2'-fluoroadenosine
  modified_base 15: mod_base = gm
  modified_base 16: mod_base = OTHER; note = 2'-fluorouridine
  modified_base 17: mod_base = cm
  modified_base 18: mod_base = OTHER; note = 2'-O-methyladenosine
  modified_base 19: mod_base = cm
  modified_base 20: mod_base = OTHER; note = 2'-O-methyladenosine
  modified_base 21: mod_base = OTHER; note = 2'-O-methyladenosine with a 3'-phosphorothioate linkage
  modified_base 22: mod_base = OTHER; note = 2'-O-methylguanosine with a 3'-phosphorothioate linkage
  modified_base 23: mod_base = cm
ttcacttctgcagagtcacaagc

SEQ ID NO: 2200 - RNA, 23 nt, synthetic construct
  source 1..23: mol_type = other RNA
  modified_base 1: mod_base = OTHER; note = 2'-O-methyluridine with a 3'-phosphorothioate linkage
  modified_base 2: mod_base = OTHER; note = 2'-fluorouridine with a 3'-phosphorothioate linkage
  modified_base 3: mod_base = OTHER; note = 2'-O-methyladenosine
  modified_base 4: mod_base = um
  modified_base 5: mod_base = OTHER; note = 2'-fluorocytidine
  modified_base 6: mod_base = OTHER; note = 2'-O-methyladenosine
  modified_base 7: mod_base = OTHER; note = 2'-fluorocytidine
  modified_base 8: mod_base = um
  modified_base 9: mod_base = gm
  modified_base 10: mod_base = cm
  modified_base 11: mod_base = gm
  modified_base 12: mod_base = OTHER; note = 2'-O-methyladenosine
  modified_base 13: mod_base = OTHER; note = 2'-O-methyladenosine
  modified_base 14: mod_base = OTHER; note = 2'-fluorocytidine
  modified_base 15: mod_base = cm
  modified_base 16: mod_base = OTHER; note = 2'-fluorocytidine
  modified_base 17: mod_base = um
  modified_base 18: mod_base = um
  modified_base 19: mod_base = cm
  modified_base 20: mod_base = OTHER; note = 2'-O-methyladenosine
  modified_base 21: mod_base = OTHER; note = 2'-O-methylguanosine with a 3'-phosphorothioate linkage
  modified_base 22: mod_base = OTHER; note = 2'-O-methyladenosine with a 3'-phosphorothioate linkage
  modified_base 23: mod_base = um
ttatcactgcgaacccttcagat

SEQ ID NO: 2201 - RNA, 23 nt, synthetic construct
  source 1..23: mol_type = other RNA
  modified_base 1: mod_base = OTHER; note = 2'-O-methyluridine with a 3'-phosphorothioate linkage
  modified_base 2: mod_base = OTHER; note = 2'-fluorouridine with a 3'-phosphorothioate linkage
  modified_base 3: mod_base = um
  modified_base 4: mod_base = OTHER; note = 2'-O-methyladenosine
  modified_base 5: mod_base = OTHER; note = 2'-fluorouridine
  modified_base 6: mod_base = cm
  modified_base 7: mod_base = OTHER; note = 2'-fluoroadenosine
  modified_base 8: mod_base = cm
  modified_base 9: mod_base = um
  modified_base 10: mod_base = gm
  modified_base 11: mod_base = cm
  modified_base 12: mod_base = gm
  modified_base 13: mod_base = OTHER; note = 2'-O-methyladenosine
  modified_base 14: mod_base = OTHER; note = 2'-fluoroadenosine
  modified_base 15: mod_base = cm
  modified_base 16: mod_base = OTHER; note = 2'-fluorocytidine
  modified_base 17: mod_base = cm
  modified_base 18: mod_base = um
  modified_base 19: mod_base = um
  modified_base 20: mod_base = cm
  modified_base 21: mod_base = OTHER; note = 2'-O-methyladenosine with a 3'-phosphorothioate linkage
  modified_base 22: mod_base = OTHER; note = 2'-O-methylguanosine with a 3'-phosphorothioate linkage
  modified_base 23: mod_base = OTHER; note = 2'-O-methyladenosine
tttatcactgcgaacccttcaga

SEQ ID NO: 2202 - RNA, 23 nt, synthetic construct
  source 1..23: mol_type = other RNA
  modified_base 1: mod_base = OTHER; note = 2'-O-methyluridine with a 3'-phosphorothioate linkage
  modified_base 2: mod_base = OTHER; note = 2'-fluorouridine with a 3'-phosphorothioate linkage
  modified_base 3: mod_base = um
  modified_base 4: mod_base = um
  modified_base 5: mod_base = OTHER; note = 2'-fluoroadenosine
  modified_base 6: mod_base = um
  modified_base 7: mod_base = OTHER; note = 2'-fluorocytidine
  modified_base 8: mod_base = OTHER; note = 2'-O-methyladenosine
  modified_base 9: mod_base = cm
  modified_base 10: mod_base = um
  modified_base 11: mod_base = gm
  modified_base 12: mod_base = cm
  modified_base 13: mod_base = gm
  modified_base 14: mod_base = OTHER; note = 2'-fluoroadenosine
  modified_base 15: mod_base = OTHER; note = 2'-O-methyladenosine
  modified_base 16: mod_base = OTHER; note = 2'-fluorocytidine
  modified_base 17: mod_base = cm
  modified_base 18: mod_base = cm
  modified_base 19: mod_base = um
  modified_base 20: mod_base = um
  modified_base 21: mod_base = OTHER; note = 2'-O-methylcytidine with a 3'-phosphorothioate linkage
  modified_base 22: mod_base = OTHER; note = 2'-O-methyladenosine with a 3'-phosphorothioate linkage
  modified_base 23: mod_base = gm
ttttatcactgcgaacccttcag

SEQ ID NO: 2203 - RNA, 23 nt, synthetic construct
  source 1..23: mol_type = other RNA
  modified_base 1: mod_base = OTHER; note = 2'-O-methyluridine with a 3'-phosphorothioate linkage
  modified_base 2: mod_base = OTHER; note = 2'-fluorocytidine with a 3'-phosphorothioate linkage
  modified_base 3: mod_base = cm
  modified_base 4: mod_base = um
  modified_base 5: mod_base = OTHER; note = 2'-fluorouridine
  modified_base 6: mod_base = um
  modified_base 7: mod_base = OTHER; note = 2'-fluoroadenosine
  modified_base 8: mod_base = um
  modified_base 9: mod_base = cm
  modified_base 10: mod_base = OTHER; note = 2'-O-methyladenosine
  modified_base 11: mod_base = cm
  modified_base 12: mod_base = um
  modified_base 13: mod_base = gm
  modified_base 14: mod_base = OTHER; note = 2'-fluorocytidine
  modified_base 15: mod_base = gm
  modified_base 16: mod_base = OTHER; note = 2'-fluoroadenosine
  modified_base 17: mod_base = OTHER; note = 2'-O-methyladenosine
  modified_base 18: mod_base = cm
  modified_base 19: mod_base = cm
  modified_base 20: mod_base = cm
  modified_base 21: mod_base = OTHER; note = 2'-O-methyluridine with a 3'-phosphorothioate linkage
  modified_base 22: mod_base = OTHER; note = 2'-O-methyluridine with a 3'-phosphorothioate linkage
  modified_base 23: mod_base = cm
tcctttatcactgcgaacccttc

SEQ ID NO: 2204 - RNA, 23 nt, synthetic construct
  source 1..23: mol_type = other RNA
  modified_base 1: mod_base = OTHER; note = 2'-O-methyluridine with a 3'-phosphorothioate linkage
  modified_base 2: mod_base = OTHER; note = 2'-fluorouridine with a 3'-phosphorothioate linkage
  modified_base 3: mod_base = cm
  modified_base 4: mod_base = cm
  modified_base 5: mod_base = OTHER; note = 2'-fluorouridine
  modified_base 6: mod_base = um
  modified_base 7: mod_base = OTHER; note = 2'-fluorouridine
  modified_base 8: mod_base = OTHER; note = 2'-O-methyladenosine
  modified_base 9: mod_base = um
  modified_base 10: mod_base = cm
  modified_base 11: mod_base = OTHER; note = 2'-O-methyladenosine
  modified_base 12: mod_base = cm
  modified_base 13: mod_base = um
  modified_base 14: mod_base = OTHER; note = 2'-fluoroguanosine
  modified_base 15: mod_base = cm
  modified_base 16: mod_base = OTHER; note = 2'-fluoroguanosine
  modified_base 17: mod_base = OTHER; note = 2'-O-methyladenosine
  modified_base 18: mod_base = OTHER; note = 2'-O-methyladenosine
  modified_base 19: mod_base = cm
  modified_base 20: mod_base = cm
  modified_base 21: mod_base = OTHER; note = 2'-O-methylcytidine with a 3'-phosphorothioate linkage
  modified_base 22: mod_base = OTHER; note = 2'-O-methyluridine with a 3'-phosphorothioate linkage
  modified_base 23: mod_base = um
ttcctttatcactgcgaaccctt

SEQ ID NO: 2205 - RNA, 23 nt, synthetic construct
  source 1..23: mol_type = other RNA
  modified_base 1: mod_base = OTHER; note = 2'-O-methyluridine with a 3'-phosphorothioate linkage
  modified_base 2: mod_base = OTHER; note = 2'-fluoroguanosine with a 3'-phosphorothioate linkage
  modified_base 3: mod_base = cm
  modified_base 4: mod_base = cm
  modified_base 5: mod_base = OTHER; note = 2'-fluorouridine
  modified_base 6: mod_base = cm
  modified_base 7: mod_base = OTHER; note = 2'-fluorocytidine
  modified_base 8: mod_base = um
  modified_base 9: mod_base = um
  modified_base 10: mod_base = um
  modified_base 11: mod_base = OTHER; note = 2'-O-methyladenosine
  modified_base 12: mod_base = um
  modified_base 13: mod_base = cm
  modified_base 14: mod_base = OTHER; note = 2'-fluoroadenosine
  modified_base 15: mod_base = cm
  modified_base 16: mod_base = OTHER; note = 2'-fluorouridine
  modified_base 17: mod_base = gm
  modified_base 18: mod_base = cm
  modified_base 19: mod_base = gm
  modified_base 20: mod_base = OTHER; note = 2'-O-methyladenosine
  modified_base 21: mod_base = OTHER; note = 2'-O-methyladenosine with a 3'-phosphorothioate linkage
  modified_base 22: mod_base = OTHER; note = 2'-O-methylcytidine with a 3'-phosphorothioate linkage
  modified_base 23: mod_base = cm
tgcctcctttatcactgcgaacc

SEQ ID NO: 2206 - RNA, 23 nt, synthetic construct
  source 1..23: mol_type = other RNA
  modified_base 1: mod_base = OTHER; note = 2'-O-methyluridine with a 3'-phosphorothioate linkage
  modified_base 2: mod_base = OTHER; note = 2'-fluoroadenosine with a 3'-phosphorothioate linkage
  modified_base 3: mod_base = OTHER; note = 2'-O-methyladenosine
  modified_base 4: mod_base = OTHER; note = 2'-O-methyladenosine
  modified_base 5: mod_base = OTHER; note = 2'-fluorouridine
  modified_base 6: mod_base = gm
  modified_base 7: mod_base = OTHER; note = 2'-fluorocytidine
  modified_base 8: mod_base = cm
  modified_base 9: mod_base = um
  modified_base 10: mod_base = cm
  modified_base 11: mod_base = cm
  modified_base 12: mod_base = um
  modified_base 13: mod_base = um
  modified_base 14: mod_base = OTHER; note = 2'-fluorouridine
  modified_base 15: mod_base = OTHER; note = 2'-O-methyladenosine
  modified_base 16: mod_base = OTHER; note = 2'-fluorouridine
  modified_base 17: mod_base = cm
  modified_base 18: mod_base = OTHER; note = 2'-O-methyladenosine
  modified_base 19: mod_base = cm
  modified_base 20: mod_base = um
  modified_base 21: mod_base = OTHER; note = 2'-O-methylguanosine with a 3'-phosphorothioate linkage
  modified_base 22: mod_base = OTHER; note = 2'-O-methylcytidine with a 3'-phosphorothioate linkage
  modified_base 23: mod_base = gm
taaatgcctcctttatcactgcg

SEQ ID NO: 2207 - RNA, 23 nt, synthetic construct
  source 1..23: mol_type = other RNA
  modified_base 1: mod_base = OTHER; note = 2'-O-methyluridine with a 3'-phosphorothioate linkage
  modified_base 2: mod_base = OTHER; note = 2'-fluorouridine with a 3'-phosphorothioate linkage
  modified_base 3: mod_base = OTHER; note = 2'-O-methyladenosine
  modified_base 4: mod_base = gm
  modified_base 5: mod_base = OTHER; note = 2'-fluoroadenosine
  modified_base 6: mod_base = cm
  modified_base 7: mod_base = OTHER; note = 2'-fluoroguanosine
  modified_base 8: mod_base = um
  modified_base 9: mod_base = gm
  modified_base 10: mod_base = cm
  modified_base 11: mod_base = OTHER; note = 2'-O-methyladenosine
  modified_base 12: mod_base = OTHER; note = 2'-O-methyladenosine
  modified_base 13: mod_base = OTHER; note = 2'-O-methyladenosine
  modified_base 14: mod_base = OTHER; note = 2'-fluorouridine
  modified_base 15: mod_base = cm
  modified_base 16: mod_base = OTHER; note = 2'-fluorouridine
  modified_base 17: mod_base = gm
  modified_base 18: mod_base = cm
  modified_base 19: mod_base = um
  modified_base 20: mod_base = OTHER; note = 2'-O-methyladenosine
  modified_base 21: mod_base = OTHER; note = 2'-O-methylguanosine with a 3'-phosphorothioate linkage
  modified_base 22: mod_base = OTHER; note = 2'-O-methyluridine with a 3'-phosphorothioate linkage
  modified_base 23: mod_base = gm
ttagacgtgcaaatctgctagtg

SEQ ID NO: 2208 - RNA, 23 nt, synthetic construct
  source 1..23: mol_type = other RNA
  modified_base 1: mod_base = OTHER; note = 2'-O-methyluridine with a 3'-phosphorothioate linkage
  modified_base 2: mod_base = OTHER; note = 2'-fluoroguanosine with a 3'-phosphorothioate linkage
  modified_base 3: mod_base = um
  modified_base 4: mod_base = OTHER; note = 2'-O-methyladenosine
  modified_base 5: mod_base = OTHER; note = 2'-fluoroguanosine
  modified_base 6: mod_base = OTHER; note = 2'-O-methyladenosine
  modified_base 7: mod_base = OTHER; note = 2'-fluorocytidine
  modified_base 8: mod_base = gm
  modified_base 9: mod_base = um
  modified_base 10: mod_base = gm
  modified_base 11: mod_base = cm
  modified_base 12: mod_base = OTHER; note = 2'-O-methyladenosine
  modified_base 13: mod_base = OTHER; note = 2'-O-methyladenosine
  modified_base 14: mod_base = OTHER; note = 2'-fluoroadenosine
  modified_base 15: mod_base = um
  modified_base 16: mod_base = OTHER; note = 2'-fluorocytidine
  modified_base 17: mod_base = um
  modified_base 18: mod_base = gm
  modified_base 19: mod_base = cm
  modified_base 20: mod_base = um
  modified_base 21: mod_base = OTHER; note = 2'-O-methyladenosine with a 3'-phosphorothioate linkage
  modified_base 22: mod_base = OTHER; note = 2'-O-methylguanosine with a 3'-phosphorothioate linkage
  modified_base 23: mod_base = um
tgtagacgtgcaaatctgctagt

SEQ ID NO: 2209 - RNA, 23 nt, synthetic construct
  source 1..23: mol_type = other RNA
  modified_base 1: mod_base = OTHER; note = 2'-O-methyluridine with a 3'-phosphorothioate linkage
  modified_base 2: mod_base = OTHER; note = 2'-fluorouridine with a 3'-phosphorothioate linkage
  modified_base 3: mod_base = gm
  modified_base 4: mod_base = um
  modified_base 5: mod_base = OTHER; note = 2'-fluoroadenosine
  modified_base 6: mod_base = gm
  modified_base 7: mod_base = OTHER; note = 2'-fluoroadenosine
  modified_base 8: mod_base = cm
  modified_base 9: mod_base = gm
  modified_base 10: mod_base = um
  modified_base 11: mod_base = gm
  modified_base 12: mod_base = cm
  modified_base 13: mod_base = OTHER; note = 2'-O-methyladenosine
  modified_base 14: mod_base = OTHER; note = 2'-fluoroadenosine
  modified_base 15: mod_base = OTHER; note = 2'-O-methyladenosine
  modified_base 16: mod_base = OTHER; note = 2'-fluorouridine
  modified_base 17: mod_base = cm
  modified_base 18: mod_base = um
  modified_base 19: mod_base = gm
  modified_base 20: mod_base = cm
  modified_base 21: mod_base = OTHER; note = 2'-O-methyluridine with a 3'-phosphorothioate linkage
  modified_base 22: mod_base = OTHER; note = 2'-O-methyladenosine with a 3'-phosphorothioate linkage
  modified_base 23: mod_base = gm
ttgtagacgtgcaaatctgctag

SEQ ID NO: 2210 - RNA, 23 nt, synthetic construct
  source 1..23: mol_type = other RNA
  modified_base 1: mod_base = OTHER; note = 2'-O-methyluridine with a 3'-phosphorothioate linkage
  modified_base 2: mod_base = OTHER; note = 2'-fluorocytidine with a 3'-phosphorothioate linkage
  modified_base 3: mod_base = um
  modified_base 4: mod_base = gm
  modified_base 5: mod_base = OTHER; note = 2'-fluorouridine
  modified_base 6: mod_base = OTHER; note = 2'-O-methyladenosine
  modified_base 7: mod_base = OTHER; note = 2'-fluoroguanosine
  modified_base 8: mod_base = OTHER; note = 2'-O-methyladenosine
  modified_base 9: mod_base = cm
  modified_base 10: mod_base = gm
  modified_base 11: mod_base = um
  modified_base 12: mod_base = gm
  modified_base 13: mod_base = cm
  modified_base 14: mod_base = OTHER; note = 2'-fluoroadenosine
  modified_base 15: mod_base = OTHER; note = 2'-O-methyladenosine
  modified_base 16: mod_base = OTHER; note = 2'-fluoroadenosine
  modified_base 17: mod_base = um
  modified_base 18: mod_base = cm
  modified_base 19: mod_base = um
  modified_base 20: mod_base = gm
  modified_base 21: mod_base = OTHER; note = 2'-O-methylcytidine with a 3'-phosphorothioate linkage
  modified_base 22: mod_base = OTHER; note = 2'-O-methyluridine with a 3'-phosphorothioate linkage
  modified_base 23: mod_base = OTHER; note = 2'-O-methyladenosine
tctgtagacgtgcaaatctgcta

SEQ ID NO: 2211 - RNA, 23 nt, synthetic construct
  source 1..23: mol_type = other RNA
  modified_base 1: mod_base = OTHER; note = 2'-O-methyluridine with a 3'-phosphorothioate linkage
  modified_base 2: mod_base = OTHER; note = 2'-fluorouridine with a 3'-phosphorothioate linkage
  modified_base 3: mod_base = cm
  modified_base 4: mod_base = um
  modified_base 5: mod_base = OTHER; note = 2'-fluoroguanosine
  modified_base 6: mod_base = um
  modified_base 7: mod_base = OTHER; note = 2'-fluoroadenosine
  modified_base 8: mod_base = gm
  modified_base 9: mod_base = OTHER; note = 2'-O-methyladenosine
  modified_base 10: mod_base = cm
  modified_base 11: mod_base = gm
  modified_base 12: mod_base = um
  modified_base 13: mod_base = gm
  modified_base 14: mod_base = OTHER; note = 2'-fluorocytidine
  modified_base 15: mod_base = OTHER; note = 2'-O-methyladenosine
  modified_base 16: mod_base = OTHER; note = 2'-fluoroadenosine
  modified_base 17: mod_base = OTHER; note = 2'-O-methyladenosine
  modified_base 18: mod_base = um
  modified_base 19: mod_base = cm
  modified_base 20: mod_base = um
  modified_base 21: mod_base = OTHER; note = 2'-O-methylguanosine with a 3'-phosphorothioate linkage
  modified_base 22: mod_base = OTHER; note = 2'-O-methylcytidine with a 3'-phosphorothioate linkage
  modified_base 23: mod_base = um
ttctgtagacgtgcaaatctgct

SEQ ID NO: 2212 - RNA, 23 nt, synthetic construct
  source 1..23: mol_type = other RNA
  modified_base 1: mod_base = OTHER; note = 2'-O-methyluridine with a 3'-phosphorothioate linkage
  modified_base 2: mod_base = OTHER; note = 2'-fluorouridine with a 3'-phosphorothioate linkage
  modified_base 3: mod_base = um
  modified_base 4: mod_base = um
  modified_base 5: mod_base = OTHER; note = 2'-fluorocytidine
  modified_base 6: mod_base = um
  modified_base 7: mod_base = OTHER; note = 2'-fluoroguanosine
  modified_base 8: mod_base = um
  modified_base 9: mod_base = OTHER; note = 2'-O-methyladenosine
  modified_base 10: mod_base = gm
  modified_base 11: mod_base = OTHER; note = 2'-O-methyladenosine
  modified_base 12: mod_base = cm
  modified_base 13: mod_base = gm
  modified_base 14: mod_base = OTHER; note = 2'-fluorouridine
  modified_base 15: mod_base = gm
  modified_base 16: mod_base = OTHER; note = 2'-fluorocytidine
  modified_base 17: mod_base = OTHER; note = 2'-O-methyladenosine
  modified_base 18: mod_base = OTHER; note = 2'-O-methyladenosine
  modified_base 19: mod_base = OTHER; note = 2'-O-methyladenosine
  modified_base 20: mod_base = um
  modified_base 21: mod_base = OTHER; note = 2'-O-methylcytidine with a 3'-phosphorothioate linkage
  modified_base 22: mod_base = OTHER; note = 2'-O-methyluridine with a 3'-phosphorothioate linkage
  modified_base 23: mod_base = gm
ttttctgtagacgtgcaaatctg

SEQ ID NO: 2213 - RNA, 23 nt, synthetic construct
  source 1..23: mol_type = other RNA
  modified_base 1: mod_base = OTHER; note = 2'-O-methyluridine with a 3'-phosphorothioate linkage
  modified_base 2: mod_base = OTHER; note = 2'-fluoroguanosine with a 3'-phosphorothioate linkage
  modified_base 3: mod_base = um
  modified_base 4: mod_base = um
  modified_base 5: mod_base = OTHER; note = 2'-fluorouridine
  modified_base 6: mod_base = cm
  modified_base 7: mod_base = OTHER; note = 2'-fluorouridine
  modified_base 8: mod_base = gm
  modified_base 9: mod_base = um
  modified_base 10: mod_base = OTHER; note = 2'-O-methyladenosine
  modified_base 11: mod_base = gm
  modified_base 12: mod_base = OTHER; note = 2'-O-methyladenosine
  modified_base 13: mod_base = cm
  modified_base 14: mod_base = OTHER; note = 2'-fluoroguanosine
  modified_base 15: mod_base = um
  modified_base 16: mod_base = OTHER; note = 2'-fluoroguanosine
  modified_base 17: mod_base = cm
  modified_base 18: mod_base = OTHER; note = 2'-O-methyladenosine
  modified_base 19: mod_base = OTHER; note = 2'-O-methyladenosine
  modified_base 20: mod_base = OTHER; note = 2'-O-methyladenosine
  modified_base 21: mod_base = OTHER; note = 2'-O-methyluridine with a 3'-phosphorothioate linkage
  modified_base 22: mod_base = OTHER; note = 2'-O-methylcytidine with a 3'-phosphorothioate linkage
  modified_base 23: mod_base = um
tgtttctgtagacgtgcaaatct

SEQ ID NO: 2214 - RNA, 23 nt, synthetic construct
  source 1..23: mol_type = other RNA
  modified_base 1: mod_base = OTHER; note = 2'-O-methyluridine with a 3'-phosphorothioate linkage
  modified_base 2: mod_base = OTHER; note = 2'-fluoroguanosine with a 3'-phosphorothioate linkage
  modified_base 3: mod_base = OTHER; note = 2'-O-methyladenosine
  modified_base 4: mod_base = um
  modified_base 5: mod_base = OTHER; note = 2'-fluoroadenosine
  modified_base 6: mod_base = um
  modified_base 7: mod_base = OTHER; note = 2'-fluoroadenosine
  modified_base 8: mod_base = OTHER; note = 2'-O-methyladenosine
  modified_base 9: mod_base = OTHER; note = 2'-O-methyladenosine
  modified_base 10: mod_base = gm
  modified_base 11: mod_base = gm
  modified_base 12: mod_base = um
  modified_base 13: mod_base = um
  modified_base 14: mod_base = OTHER; note = 2'-fluoroguanosine
  modified_base 15: mod_base = cm
  modified_base 16: mod_base = OTHER; note = 2'-fluoroguanosine
  modified_base 17: mod_base = um
  modified_base 18: mod_base = cm
  modified_base 19: mod_base = cm
  modified_base 20: mod_base = OTHER; note = 2'-O-methyladenosine
  modified_base 21: mod_base = OTHER; note = 2'-O-methylguanosine with a 3'-phosphorothioate linkage
  modified_base 22: mod_base = OTHER; note = 2'-O-methylcytidine with a 3'-phosphorothioate linkage
  modified_base 23: mod_base = um
tgatataaaggttgcgtccagct

SEQ ID NO: 2215 - RNA, 23 nt, synthetic construct
  source 1..23: mol_type = other RNA
  modified_base 1: mod_base = OTHER; note = 2'-O-methyluridine with a 3'-phosphorothioate linkage
  modified_base 2: mod_base = OTHER; note = 2'-fluoroguanosine with a 3'-phosphorothioate linkage
  modified_base 3: mod_base = gm
  modified_base 4: mod_base = OTHER; note = 2'-O-methyladenosine
  modified_base 5: mod_base = OTHER; note = 2'-fluorouridine
  modified_base 6: mod_base = OTHER; note = 2'-O-methyladenosine
  modified_base 7: mod_base = OTHER; note = 2'-fluorouridine
  modified_base 8: mod_base = OTHER; note = 2'-O-methyladenosine
  modified_base 9: mod_base = OTHER; note = 2'-O-methyladenosine
  modified_base 10: mod_base = OTHER; note = 2'-O-methyladenosine
  modified_base 11: mod_base = gm
  modified_base 12: mod_base = gm
  modified_base 13: mod_base = um
  modified_base 14: mod_base = OTHER; note = 2'-fluorouridine
  modified_base 15: mod_base = gm
  modified_base 16: mod_base = OTHER; note = 2'-fluorocytidine
  modified_base 17: mod_base = gm
  modified_base 18: mod_base = um
  modified_base 19: mod_base = cm
  modified_base 20: mod_base = cm
  modified_base 21: mod_base = OTHER; note = 2'-O-methyladenosine with a 3'-phosphorothioate linkage
  modified_base 22: mod_base = OTHER; note = 2'-O-methylguanosine with a 3'-phosphorothioate linkage
  modified_base 23: mod_base = cm
tggatataaaggttgcgtccagc

SEQ ID NO: 2216 - RNA, 23 nt, synthetic construct
  source 1..23: mol_type = other RNA
  modified_base 1: mod_base = OTHER; note = 2'-O-methyluridine with a 3'-phosphorothioate linkage
  modified_base 2: mod_base = OTHER; note = 2'-fluorocytidine with a 3'-phosphorothioate linkage
  modified_base 3: mod_base = gm
  modified_base 4: mod_base = gm
  modified_base 5: mod_base = OTHER; note = 2'-fluoroadenosine
  modified_base 6: mod_base = um
  modified_base 7: mod_base = OTHER; note = 2'-fluoroadenosine
  modified_base 8: mod_base = um
  modified_base 9: mod_base = OTHER; note = 2'-O-methyladenosine
  modified_base 10: mod_base = OTHER; note = 2'-O-methyladenosine
  modified_base 11: mod_base = OTHER; note = 2'-O-methyladenosine
  modified_base 12: mod_base = gm
  modified_base 13: mod_base = gm
  modified_base 14: mod_base = OTHER; note = 2'-fluorouridine
  modified_base 15: mod_base = um
  modified_base 16: mod_base = OTHER; note = 2'-fluoroguanosine
  modified_base 17: mod_base = cm
  modified_base 18: mod_base = gm
  modified_base 19: mod_base = um
  modified_base 20: mod_base = cm
  modified_base 21: mod_base = OTHER; note = 2'-O-methylcytidine with a 3'-phosphorothioate linkage
  modified_base 22: mod_base = OTHER; note = 2'-O-methyladenosine with a 3'-phosphorothioate linkage
  modified_base 23: mod_base = gm
tcggatataaaggttgcgtccag

SEQ ID NO: 2217 - RNA, 23 nt, synthetic construct
  source 1..23: mol_type = other RNA
  modified_base 1: mod_base = OTHER; note = 2'-O-methyluridine with a 3'-phosphorothioate linkage
  modified_base 2: mod_base = OTHER; note = 2'-fluoroadenosine with a 3'-phosphorothioate linkage
  modified_base 3: mod_base = cm
  modified_base 4: mod_base = gm
  modified_base 5: mod_base = OTHER; note = 2'-fluoroguanosine
  modified_base 6: mod_base = OTHER; note = 2'-O-methyladenosine
  modified_base 7: mod_base = OTHER; note = 2'-fluorouridine
  modified_base 8: mod_base = OTHER; note = 2'-O-methyladenosine
  modified_base 9: mod_base = um
  modified_base 10: mod_base = OTHER; note = 2'-O-methyladenosine
  modified_base 11: mod_base = OTHER; note = 2'-O-methyladenosine
  modified_base 12: mod_base = OTHER; note = 2'-O-methyladenosine
  modified_base 13: mod_base = gm
  modified_base 14: mod_base = OTHER; note = 2'-fluoroguanosine
  modified_base 15: mod_base = um
  modified_base 16: mod_base = OTHER; note = 2'-fluorouridine
  modified_base 17: mod_base = gm
  modified_base 18: mod_base = cm
  modified_base 19: mod_base = gm
  modified_base 20: mod_base = um
  modified_base 21: mod_base = OTHER; note = 2'-O-methylcytidine with a 3'-phosphorothioate linkage
  modified_base 22: mod_base = OTHER; note = 2'-O-methylcytidine with a 3'-phosphorothioate linkage
  modified_base 23: mod_base = OTHER; note = 2'-O-methyladenosine
tacggatataaaggttgcgtcca

SEQ ID NO: 2218 - RNA, 23 nt, synthetic construct
  source 1..23: mol_type = other RNA
  modified_base 1: mod_base = OTHER; note = 2'-O-methyluridine with a 3'-phosphorothioate linkage
  modified_base 2: mod_base = OTHER; note = 2'-fluoroadenosine with a 3'-phosphorothioate linkage
  modified_base 3: mod_base = OTHER; note = 2'-O-methyladenosine
  modified_base 4: mod_base = OTHER; note = 2'-O-methyladenosine
  modified_base 5: mod_base = OTHER; note = 2'-fluorocytidine
  modified_base 6: mod_base = gm
  modified_base 7: mod_base = OTHER; note = 2'-fluoroguanosine
  modified_base 8: mod_base = OTHER; note = 2'-O-methyladenosine
  modified_base 9: mod_base = um
  modified_base 10: mod_base = OTHER; note = 2'-O-methyladenosine
  modified_base 11: mod_base = um
  modified_base 12: mod_base = OTHER; note = 2'-O-methyladenosine
  modified_base 13: mod_base = OTHER; note = 2'-O-methyladenosine
  modified_base 14: mod_base = OTHER; note = 2'-fluoroadenosine
  modified_base 15: mod_base = gm
  modified_base 16: mod_base = OTHER; note = 2'-fluoroguanosine
  modified_base 17: mod_base = um
  modified_base 18: mod_base = um
  modified_base 19: mod_base = gm
  modified_base 20: mod_base = cm
  modified_base 21: mod_base = OTHER; note = 2'-O-methylguanosine with a 3'-phosphorothioate linkage
  modified_base 22: mod_base = OTHER; note = 2'-O-methyluridine with a 3'-phosphorothioate linkage
  modified_base 23: mod_base = cm
taaacggatataaaggttgcgtc

SEQ ID NO: 2219 - RNA, 23 nt, synthetic construct
  source 1..23: mol_type = other RNA
  modified_base 1: mod_base = OTHER; note = 2'-O-methyluridine with a 3'-phosphorothioate linkage
  modified_base 2: mod_base = OTHER; note = 2'-fluoroguanosine with a 3'-phosphorothioate linkage
  modified_base 3: mod_base = OTHER; note = 2'-O-methyladenosine
  modified_base 4: mod_base = OTHER; note = 2'-O-methyladenosine
  modified_base 5: mod_base = OTHER; note = 2'-fluoroadenosine
  modified_base 6: mod_base = cm
  modified_base 7: mod_base = OTHER; note = 2'-fluoroguanosine
  modified_base 8: mod_base = gm
  modified_base 9: mod_base = OTHER; note = 2'-O-methyladenosine
  modified_base 10: mod_base = um
  modified_base 11: mod_base = OTHER; note = 2'-O-methyladenosine
  modified_base 12: mod_base = um
  modified_base 13: mod_base = OTHER; note = 2'-O-methyladenosine
  modified_base 14: mod_base = OTHER; note = 2'-fluoroadenosine
  modified_base 15: mod_base = OTHER; note = 2'-O-methyladenosine
  modified_base 16: mod_base = OTHER; note = 2'-fluoroguanosine
  modified_base 17: mod_base = gm
  modified_base 18: mod_base = um
  modified_base 19: mod_base = um
  modified_base 20: mod_base = gm
  modified_base 21: mod_base = OTHER; note = 2'-O-methylcytidine with a 3'-phosphorothioate linkage
  modified_base 22: mod_base = OTHER; note = 2'-O-methylguanosine with a 3'-phosphorothioate linkage
  modified_base 23: mod_base = um
tgaaacggatataaaggttgcgt

SEQ ID NO: 2220 - RNA, 23 nt, synthetic construct
  source 1..23: mol_type = other RNA
  modified_base 1: mod_base = OTHER; note = 2'-O-methyluridine with a 3'-phosphorothioate linkage
  modified_base 2: mod_base = OTHER; note = 2'-fluoroguanosine with a 3'-phosphorothioate linkage
  modified_base 3: mod_base = gm
  modified_base 4: mod_base = OTHER; note = 2'-O-methyladenosine
  modified_base 5: mod_base = OTHER; note = 2'-fluoroadenosine
  modified_base 6: mod_base = OTHER; note = 2'-O-methyladenosine
  modified_base 7: mod_base = OTHER; note = 2'-fluorocytidine
  modified_base 8: mod_base = gm
  modified_base 9: mod_base = gm
  modified_base 10: mod_base = OTHER; note = 2'-O-methyladenosine
  modified_base 11: mod_base = um
  modified_base 12: mod_base = OTHER; note = 2'-O-methyladenosine
  modified_base 13: mod_base = um
  modified_base 14: mod_base = OTHER; note = 2'-fluoroadenosine
  modified_base 15: mod_base = OTHER; note = 2'-O-methyladenosine
  modified_base 16: mod_base = OTHER; note = 2'-fluoroadenosine
  modified_base 17: mod_base = gm
  modified_base 18: mod_base = gm
  modified_base 19: mod_base = um
  modified_base 20: mod_base = um
  modified_base 21: mod_base = OTHER; note = 2'-O-methylguanosine with a 3'-phosphorothioate linkage
  modified_base 22: mod_base = OTHER; note = 2'-O-methylcytidine with a 3'-phosphorothioate linkage
  modified_base 23: mod_base = gm
tggaaacggatataaaggttgcg

SEQ ID NO: 2221 - RNA, 23 nt, synthetic construct
  source 1..23: mol_type = other RNA
  modified_base 1: mod_base = OTHER; note = 2'-O-methyluridine with a 3'-phosphorothioate linkage
  modified_base 2: mod_base = OTHER; note = 2'-fluoroadenosine with a 3'-phosphorothioate linkage
  modified_base 3: mod_base = cm
  modified_base 4: mod_base = um
  modified_base 5: mod_base = OTHER; note = 2'-fluoroguanosine
  modified_base 6: mod_base = gm
  modified_base 7: mod_base = OTHER; note = 2'-fluoroadenosine
  modified_base 8: mod_base = OTHER; note = 2'-O-methyladenosine
  modified_base 9: mod_base = OTHER; note = 2'-O-methyladenosine
  modified_base 10: mod_base = cm
  modified_base 11: mod_base = gm
  modified_base 12: mod_base = gm
  modified_base 13: mod_base = OTHER; note = 2'-O-methyladenosine
  modified_base 14: mod_base = OTHER; note = 2'-fluorouridine
  modified_base 15: mod_base = OTHER; note = 2'-O-methyladenosine
  modified_base 16: mod_base = OTHER; note = 2'-fluorouridine
  modified_base 17: mod_base = OTHER; note = 2'-O-methyladenosine
  modified_base 18: mod_base = OTHER; note = 2'-O-methyladenosine
  modified_base 19: mod_base = OTHER; note = 2'-O-methyladenosine
  modified_base 20: mod_base = gm
  modified_base 21: mod_base = OTHER; note = 2'-O-methylguanosine with a 3'-phosphorothioate linkage
  modified_base 22: mod_base = OTHER; note = 2'-O-methyluridine with a 3'-phosphorothioate linkage
  modified_base 23: mod_base = um
tactggaaacggatataaaggtt

SEQ ID NO: 2222 - RNA, 23 nt, synthetic construct
  source 1..23: mol_type = other RNA
  modified_base 1: mod_base = OTHER; note = 2'-O-methyluridine with a 3'-phosphorothioate linkage
  modified_base 2: mod_base = OTHER; note = 2'-fluoroguanosine with a 3'-phosphorothioate linkage
  modified_base 3: mod_base = OTHER; note = 2'-O-methyladenosine
  modified_base 4: mod_base = cm
  modified_base 5: mod_base = OTHER; note = 2'-fluorouridine
  modified_base 6: mod_base = gm
  modified_base 7: mod_base = OTHER; note = 2'-fluoroguanosine
  modified_base 8: mod_base = OTHER; note = 2'-O-methyladenosine
  modified_base 9: mod_base = OTHER; note = 2'-O-methyladenosine
  modified_base 10: mod_base = OTHER; note = 2'-O-methyladenosine
  modified_base 11: mod_base = cm
  modified_base 12: mod_base = gm
  modified_base 13: mod_base = gm
  modified_base 14: mod_base = OTHER; note = 2'-fluoroadenosine
  modified_base 15: mod_base = um
  modified_base 16: mod_base = OTHER; note = 2'-fluoroadenosine
  modified_base 17: mod_base = um
  modified_base 18: mod_base = OTHER; note = 2'-O-methyladenosine
  modified_base 19: mod_base = OTHER; note = 2'-O-methyladenosine
  modified_base 20: mod_base = OTHER; note = 2'-O-methyladenosine
  modified_base 21: mod_base = OTHER; note = 2'-O-methylguanosine with a 3'-phosphorothioate linkage
  modified_base 22: mod_base = OTHER; note = 2'-O-methylguanosine with a 3'-phosphorothioate linkage
  modified_base 23: mod_base = um
tgactggaaacggatataaaggt

SEQ ID NO: 2223 - RNA, 23 nt, synthetic construct
  source 1..23: mol_type = other RNA
  modified_base 1: mod_base = OTHER; note = 2'-O-methyluridine with a 3'-phosphorothioate linkage
  modified_base 2: mod_base = OTHER; note = 2'-fluoroadenosine with a 3'-phosphorothioate linkage
  modified_base 3: mod_base = cm
  modified_base 4: mod_base = cm
  modified_base 5: mod_base = OTHER; note = 2'-fluorouridine
  modified_base 6: mod_base = gm
  modified_base 7: mod_base = OTHER; note = 2'-fluoroguanosine
  modified_base 8: mod_base = OTHER; note = 2'-O-methyladenosine
  modified_base 9: mod_base = cm
  modified_base 10: mod_base = um
  modified_base 11: mod_base = gm
  modified_base 12: mod_base = gm
  modified_base 13: mod_base = OTHER; note = 2'-O-methyladenosine
  modified_base 14: mod_base = OTHER; note = 2'-fluoroadenosine
  modified_base 15: mod_base = OTHER; note = 2'-O-methyladenosine
  modified_base 16: mod_base = OTHER; note = 2'-fluorocytidine
  modified_base 17: mod_base = gm
  modified_base 18: mod_base = gm
  modified_base 19: mod_base = OTHER; note = 2'-O-methyladenosine
  modified_base 20: mod_base = um
  modified_base 21: mod_base = OTHER; note = 2'-O-methyladenosine with a 3'-phosphorothioate linkage
  modified_base 22: mod_base = OTHER; note = 2'-O-methyluridine with a 3'-phosphorothioate linkage
  modified_base 23: mod_base = OTHER; note = 2'-O-methyladenosine
tacctggactggaaacggatata

SEQ ID NO: 2224 - RNA, 23 nt, synthetic construct
  source 1..23: mol_type = other RNA
  modified_base 1: mod_base = OTHER; note = 2'-O-methyluridine with a 3'-phosphorothioate linkage
  modified_base 2: mod_base = OTHER; note = 2'-fluoroadenosine with a 3'-phosphorothioate linkage
  modified_base 3: mod_base = OTHER; note = 2'-O-methyladenosine
  modified_base 4: mod_base = um
  modified_base 5: mod_base = OTHER; note = 2'-fluoroguanosine
  modified_base 6: mod_base = OTHER; note = 2'-O-methyladenosine
  modified_base 7: mod_base = OTHER; note = 2'-fluorocytidine
  modified_base 8: mod_base = OTHER; note = 2'-O-methyladenosine
  modified_base 9: mod_base = gm
  modified_base 10: mod_base = cm
  modified_base 11: mod_base = um
  modified_base 12: mod_base = um
  modified_base 13: mod_base = cm
  modified_base 14: mod_base = OTHER; note = 2'-fluoroadenosine
  modified_base 15: mod_base = cm
  modified_base 16: mod_base = OTHER; note = 2'-fluoroadenosine
  modified_base 17: mod_base = OTHER; note = 2'-O-methyladenosine
  modified_base 18: mod_base = OTHER; note = 2'-O-methyladenosine
  modified_base 19: mod_base = cm
  modified_base 20: mod_base = OTHER; note = 2'-O-methyladenosine
  modified_base 21: mod_base = OTHER; note = 2'-O-methyladenosine with a 3'-phosphorothioate linkage
  modified_base 22: mod_base = OTHER; note = 2'-O-methylcytidine with a 3'-phosphorothioate linkage
  modified_base 23: mod_base = OTHER; note = 2'-O-methyladenosine
taatgacagcttcacaaacaaca

SEQ ID NO: 2225 - RNA, 23 nt, synthetic construct
  source 1..23: mol_type = other RNA
  modified_base 1: mod_base = OTHER; note = 2'-O-methyluridine with a 3'-phosphorothioate linkage
  modified_base 2: mod_base = OTHER; note = 2'-fluorouridine with a 3'-phosphorothioate linkage
  modified_base 3: mod_base = gm
  modified_base 4: mod_base = gm
  modified_base 5: mod_base = OTHER; note = 2'-fluoroadenosine
  modified_base 6: mod_base = OTHER; note = 2'-O-methyladenosine
  modified_base 7: mod_base = OTHER; note = 2'-fluorouridine
  modified_base 8: mod_base = gm
  modified_base 9: mod_base = OTHER; note = 2'-O-methyladenosine
  modified_base 10: mod_base = cm
  modified_base 11: mod_base = OTHER; note = 2'-O-methyladenosine
  modified_base 12: mod_base = gm
  modified_base 13: mod_base = cm
  modified_base 14: mod_base = OTHER; note = 2'-fluorouridine
  modified_base 15: mod_base = um
  modified_base 16: mod_base = OTHER; note = 2'-fluorocytidine
  modified_base 17: mod_base = OTHER; note = 2'-O-methyladenosine
  modified_base 18: mod_base = cm
  modified_base 19: mod_base = OTHER; note = 2'-O-methyladenosine
  modified_base 20: mod_base = OTHER; note = 2'-O-methyladenosine
  modified_base 21: mod_base = OTHER; note = 2'-O-methyladenosine with a 3'-phosphorothioate linkage
  modified_base 22: mod_base = OTHER; note = 2'-O-methylcytidine with a 3'-phosphorothioate linkage
  modified_base 23: mod_base = OTHER; note = 2'-O-methyladenosine
ttggaatgacagcttcacaaaca

SEQ ID NO: 2226 - RNA, 23 nt, synthetic construct
  source 1..23: mol_type = other RNA
  modified_base 1: mod_base = OTHER; note = 2'-O-methyluridine with a 3'-phosphorothioate linkage
  modified_base 2: mod_base = OTHER; note = 2'-fluorocytidine with a 3'-phosphorothioate linkage
  modified_base 3: mod_base = um
  modified_base 4: mod_base = gm
  modified_base 5: mod_base = OTHER; note = 2'-fluoroguanosine
  modified_base 6: mod_base = OTHER; note = 2'-O-methyladenosine
  modified_base 7: mod_base = OTHER; note = 2'-fluoroadenosine
  modified_base 8: mod_base = um
  modified_base 9: mod_base = gm
  modified_base 10: mod_base = OTHER; note = 2'-O-methyladenosine
  modified_base 11: mod_base = cm
  modified_base 12: mod_base = OTHER; note = 2'-O-methyladenosine
  modified_base 13: mod_base = gm
  modified_base 14: mod_base = OTHER; note = 2'-fluorocytidine
  modified_base 15: mod_base = um
  modified_base 16: mod_base = OTHER; note = 2'-fluorouridine
  modified_base 17: mod_base = cm
  modified_base 18: mod_base = OTHER; note = 2'-O-methyladenosine
  modified_base 19: mod_base = cm
  modified_base 20: mod_base = OTHER; note = 2'-O-methyladenosine
  modified_base 21: mod_base = OTHER; note = 2'-O-methyladenosine with a 3'-phosphorothioate linkage
  modified_base 22: mod_base = OTHER; note = 2'-O-methyladenosine with a 3'-phosphorothioate linkage
  modified_base 23: mod_base = cm
tctggaatgacagcttcacaaac

SEQ ID NO: 2227 - RNA, 23 nt, synthetic construct
  source 1..23: mol_type = other RNA
  modified_base 1: mod_base = OTHER; note = 2'-O-methyluridine with a 3'-phosphorothioate linkage
  modified_base 2: mod_base = OTHER; note = 2'-fluorouridine with a 3'-phosphorothioate linkage
  modified_base 3: mod_base = um
  modified_base 4: mod_base = gm
  modified_base 5: mod_base = OTHER; note = 2'-fluoroguanosine
  modified_base 6: mod_base = cm
  modified_base 7: mod_base = OTHER; note = 2'-fluorouridine
  modified_base 8: mod_base = gm
  modified_base 9: mod_base = gm
  modified_base 10: mod_base = OTHER; note = 2'-O-methyladenosine
  modified_base 11: mod_base = OTHER; note = 2'-O-methyladenosine
  modified_base 12: mod_base = um
  modified_base 13: mod_base = gm
  modified_base 14: mod_base = OTHER; note = 2'-fluoroadenosine
  modified_base 15: mod_base = cm
  modified_base 16: mod_base = OTHER; note = 2'-fluoroadenosine
  modified_base 17: mod_base = gm
  modified_base 18: mod_base = cm
  modified_base 19: mod_base = um
  modified_base 20: mod_base = um
  modified_base 21: mod_base = OTHER; note = 2'-O-methylcytidine with a 3'-phosphorothioate linkage
  modified_base 22: mod_base = OTHER; note = 2'-O-methyladenosine with a 3'-phosphorothioate linkage
  modified_base 23: mod_base = cm
tttggctggaatgacagcttcac

SEQ ID NO: 2228 - RNA, 23 nt, synthetic construct
  source 1..23: mol_type = other RNA
  modified_base 1: mod_base = OTHER; note = 2'-O-methyluridine with a 3'-phosphorothioate linkage
  modified_base 2: mod_base = OTHER; note = 2'-fluoroadenosine with a 3'-phosphorothioate linkage
  modified_base 3: mod_base = cm
  modified_base 4: mod_base = cm
  modified_base 5: mod_base = OTHER; note = 2'-fluorouridine
  modified_base 6: mod_base = um
  modified_base 7: mod_base = OTHER; note = 2'-fluoroguanosine
  modified_base 8: mod_base = gm
  modified_base 9: mod_base = cm
  modified_base 10: mod_base = um
  modified_base 11: mod_base = gm
  modified_base 12: mod_base = gm
  modified_base 13: mod_base = OTHER; note = 2'-O-methyladenosine
  modified_base 14: mod_base = OTHER; note = 2'-fluoroadenosine
  modified_base 15: mod_base = um
  modified_base 16: mod_base = OTHER; note = 2'-fluoroguanosine
  modified_base 17: mod_base = OTHER; note = 2'-O-methyladenosine
  modified_base 18: mod_base = cm
  modified_base 19: mod_base = OTHER; note = 2'-O-methyladenosine
  modified_base 20: mod_base = gm
  modified_base 21: mod_base = OTHER; note = 2'-O-methylcytidine with a 3'-phosphorothioate linkage
  modified_base 22: mod_base = OTHER; note = 2'-O-methyluridine with a 3'-phosphorothioate linkage
  modified_base 23: mod_base = um
taccttggctggaatgacagctt

SEQ ID NO: 2229 - RNA, 23 nt, synthetic construct
  source 1..23: mol_type = other RNA
  modified_base 1: mod_base = OTHER; note = 2'-O-methyluridine with a 3'-phosphorothioate linkage
  modified_base 2: mod_base = OTHER; note = 2'-fluoroadenosine with a 3'-phosphorothioate linkage
  modified_base 3: mod_base = OTHER; note = 2'-O-methyladenosine
  modified_base 4: mod_base = cm
  modified_base 5: mod_base = OTHER; note = 2'-fluorocytidine
  modified_base 6: mod_base = um
  modified_base 7: mod_base = OTHER; note = 2'-fluorouridine
  modified_base 8: mod_base = gm
  modified_base 9: mod_base = gm
  modified_base 10: mod_base = cm
  modified_base 11: mod_base = um
  modified_base 12: mod_base = gm
  modified_base 13: mod_base = gm
  modified_base 14: mod_base = OTHER; note = 2'-fluoroadenosine
  modified_base 15: mod_base = OTHER; note = 2'-O-methyladenosine
  modified_base 16: mod_base = OTHER; note = 2'-fluorouridine
  modified_base 17: mod_base = gm
  modified_base 18: mod_base = OTHER; note = 2'-O-methyladenosine
  modified_base 19: mod_base = cm
  modified_base 20: mod_base = OTHER; note = 2'-O-methyladenosine
  modified_base 21: mod_base = OTHER; note = 2'-O-methylguanosine with a 3'-phosphorothioate linkage
  modified_base 22: mod_base = OTHER; note = 2'-O-methylcytidine with a 3'-phosphorothioate linkage
  modified_base 23: mod_base = um
taaccttggctggaatgacagct

SEQ ID NO: 2230 - RNA, 23 nt, synthetic construct
  source 1..23: mol_type = other RNA
  modified_base 1: mod_base = OTHER; note = 2'-O-methyluridine with a 3'-phosphorothioate linkage
  modified_base 2: mod_base = OTHER; note = 2'-fluorocytidine with a 3'-phosphorothioate linkage
  modified_base 3: mod_base = OTHER; note = 2'-O-methyladenosine
  modified_base 4: mod_base = OTHER; note = 2'-O-methyladenosine
  modified_base 5: mod_base = OTHER; note = 2'-fluorocytidine
  modified_base 6: mod_base = cm
  modified_base 7: mod_base = OTHER; note = 2'-fluorouridine
  modified_base 8: mod_base = um
  modified_base 9: mod_base = gm
  modified_base 10: mod_base = gm
  modified_base 11: mod_base = cm
  modified_base 12: mod_base = um
  modified_base 13: mod_base = gm
  modified_base 14: mod_base = OTHER; note = 2'-fluoroguanosine
  modified_base 15: mod_base = OTHER; note = 2'-O-methyladenosine
  modified_base 16: mod_base = OTHER; note = 2'-fluoroadenosine
  modified_base 17: mod_base = um
  modified_base 18: mod_base = gm
  modified_base 19: mod_base = OTHER; note = 2'-O-methyladenosine
  modified_base 20: mod_base = cm
  modified_base 21: mod_base = OTHER; note = 2'-O-methyladenosine with a 3'-phosphorothioate linkage
  modified_base 22: mod_base = OTHER; note = 2'-O-methylguanosine with a 3'-phosphorothioate linkage
  modified_base 23: mod_base = cm
tcaaccttggctggaatgacagc

SEQ ID NO: 2231 - RNA, 23 nt, synthetic construct
  source 1..23: mol_type = other RNA
  modified_base 1: mod_base = OTHER; note = 2'-O-methyluridine with a 3'-phosphorothioate linkage
  modified_base 2: mod_base = OTHER; note = 2'-fluoroadenosine with a 3'-phosphorothioate linkage
  modified_base 3: mod_base = cm
  modified_base 4: mod_base = OTHER; note = 2'-O-methyladenosine
  modified_base 5: mod_base = OTHER; note = 2'-fluoroadenosine
  modified_base 6: mod_base = cm
  modified_base 7: mod_base = OTHER; note = 2'-fluorocytidine
  modified_base 8: mod_base = um
  modified_base 9: mod_base = um
  modified_base 10: mod_base = gm
  modified_base 11: mod_base = gm
  modified_base 12: mod_base = cm
  modified_base 13: mod_base = um
  modified_base 14: mod_base = OTHER; note = 2'-fluoroguanosine
  modified_base 15: mod_base = gm
  modified_base 16: mod_base = OTHER; note = 2'-fluoroadenosine
  modified_base 17: mod_base = OTHER; note = 2'-O-methyladenosine
  modified_base 18: mod_base = um
  modified_base 19: mod_base = gm
  modified_base 20: mod_base = OTHER; note = 2'-O-methyladenosine
  modified_base 21: mod_base = OTHER; note = 2'-O-methylcytidine with a 3'-phosphorothioate linkage
  modified_base 22: mod_base = OTHER; note = 2'-O-methyladenosine with a 3'-phosphorothioate linkage
  modified_base 23: mod_base = gm
tacaaccttggctggaatgacag

SEQ ID NO: 2232 - RNA, 23 nt, synthetic construct
  source 1..23: mol_type = other RNA
  modified_base 1: mod_base = OTHER; note = 2'-O-methyluridine with a 3'-phosphorothioate linkage
  modified_base 2: mod_base = OTHER; note = 2'-fluorouridine with a 3'-phosphorothioate linkage
  modified_base 3: mod_base = OTHER; note = 2'-O-methyladenosine
  modified_base 4: mod_base = gm
  modified_base 5: mod_base = OTHER; note = 2'-fluorocytidine
  modified_base 6: mod_base = cm
  modified_base 7: mod_base = OTHER; note = 2'-fluorouridine
  modified_base 8: mod_base = cm
  modified_base 9: mod_base = cm
  modified_base 10: mod_base = um
  modified_base 11: mod_base = OTHER; note = 2'-O-methyladenosine
  modified_base 12: mod_base = um
  modified_base 13: mod_base = gm
  modified_base 14: mod_base = OTHER; note = 2'-fluorocytidine
  modified_base 15: mod_base = um
  modified_base 16: mod_base = OTHER; note = 2'-fluorocytidine
  modified_base 17: mod_base = cm
  modified_base 18: mod_base = cm
  modified_base 19: mod_base = OTHER; note = 2'-O-methyladenosine
  modified_base 20: mod_base = gm
  modified_base 21: mod_base = OTHER; note = 2'-O-methylcytidine with a 3'-phosphorothioate linkage
  modified_base 22: mod_base = OTHER; note = 2'-O-methylcytidine with a 3'-phosphorothioate linkage
  modified_base 23: mod_base = OTHER; note = 2'-O-methyladenosine
ttagcctcctatgctcccagcca

SEQ ID NO: 2233 - RNA, 23 nt, synthetic construct
  source 1..23: mol_type = other RNA
  modified_base 1: mod_base = OTHER; note = 2'-O-methyluridine with a 3'-phosphorothioate linkage
  modified_base 2: mod_base = OTHER; note = 2'-fluoroguanosine with a 3'-phosphorothioate linkage
  modified_base 3: mod_base = um
  modified_base 4: mod_base = OTHER; note = 2'-O-methyladenosine
  modified_base 5: mod_base = OTHER; note = 2'-fluoroguanosine
  modified_base 6: mod_base = cm
  modified_base 7: mod_base = OTHER; note = 2'-fluorocytidine
  modified_base 8: mod_base = um
  modified_base 9: mod_base = cm
  modified_base 10: mod_base = cm
  modified_base 11: mod_base = um
  modified_base 12: mod_base = OTHER; note = 2'-O-methyladenosine
  modified_base 13: mod_base = um
  modified_base 14: mod_base = OTHER; note = 2'-fluoroguanosine
  modified_base 15: mod_base = cm
  modified_base 16: mod_base = OTHER; note = 2'-fluorouridine
  modified_base 17: mod_base = cm
  modified_base 18: mod_base = cm
  modified_base 19: mod_base = cm
  modified_base 20: mod_base = OTHER; note = 2'-O-methyladenosine
  modified_base 21: mod_base = OTHER; note = 2'-O-methylguanosine with a 3'-phosphorothioate linkage
  modified_base 22: mod_base = OTHER; note = 2'-O-methylcytidine with a 3'-phosphorothioate linkage
  modified_base 23: mod_base = cm
tgtagcctcctatgctcccagcc

SEQ ID NO: 2234 - RNA, 23 nt, synthetic construct
  source 1..23: mol_type = other RNA
  modified_base 1: mod_base = OTHER; note = 2'-O-methyluridine with a 3'-phosphorothioate linkage
  modified_base 2: mod_base = OTHER; note = 2'-fluorouridine with a 3'-phosphorothioate linkage
  modified_base 3: mod_base = um
  modified_base 4: mod_base = gm
  modified_base 5: mod_base = OTHER; note = 2'-fluorouridine
  modified_base 6: mod_base = OTHER; note = 2'-O-methyladenosine
  modified_base 7: mod_base = OTHER; note = 2'-fluoroguanosine
  modified_base 8: mod_base = cm
  modified_base 9: mod_base = cm
  modified_base 10: mod_base = um
  modified_base 11: mod_base = cm
  modified_base 12: mod_base = cm
  modified_base 13: mod_base = um
  modified_base 14: mod_base = OTHER; note = 2'-fluoroadenosine
  modified_base 15: mod_base = um
  modified_base 16: mod_base = OTHER; note = 2'-fluoroguanosine
  modified_base 17: mod_base = cm
  modified_base 18: mod_base = um
  modified_base 19: mod_base = cm
  modified_base 20: mod_base = cm
  modified_base 21: mod_base = OTHER; note = 2'-O-methylcytidine with a 3'-phosphorothioate linkage
  modified_base 22: mod_base = OTHER; note = 2'-O-methyladenosine with a 3'-phosphorothioate linkage
  modified_base 23: mod_base = gm
tttgtagcctcctatgctcccag

SEQ ID NO: 2235 - RNA, 23 nt, synthetic construct
  source 1..23: mol_type = other RNA
  modified_base 1: mod_base = OTHER; note = 2'-O-methyluridine with a 3'-phosphorothioate linkage
  modified_base 2: mod_base = OTHER; note = 2'-fluoroguanosine with a 3'-phosphorothioate linkage
  modified_base 3: mod_base = um
  modified_base 4: mod_base = um
  modified_base 5: mod_base = OTHER; note = 2'-fluoroguanosine
  modified_base 6: mod_base = um
  modified_base 7: mod_base = OTHER; note = 2'-fluoroadenosine
  modified_base 8: mod_base = gm
  modified_base 9: mod_base = cm
  modified_base 10: mod_base = cm
  modified_base 11: mod_base = um
  modified_base 12: mod_base = cm
  modified_base 13: mod_base = cm
  modified_base 14: mod_base = OTHER; note = 2'-fluorouridine
  modified_base 15: mod_base = OTHER; note = 2'-O-methyladenosine
  modified_base 16: mod_base = OTHER; note = 2'-fluorouridine
  modified_base 17: mod_base = gm
  modified_base 18: mod_base = cm
  modified_base 19: mod_base = um
  modified_base 20: mod_base = cm
  modified_base 21: mod_base = OTHER; note = 2'-O-methylcytidine with a 3'-phosphorothioate linkage
  modified_base 22: mod_base = OTHER; note = 2'-O-methylcytidine with a 3'-phosphorothioate linkage
  modified_base 23: mod_base = OTHER; note = 2'-O-methyladenosine
tgttgtagcctcctatgctccca

SEQ ID NO: 2236 - RNA, 23 nt, synthetic construct
  source 1..23: mol_type = other RNA
  modified_base 1: mod_base = OTHER; note = 2'-O-methyluridine with a 3'-phosphorothioate linkage
  modified_base 2: mod_base = OTHER; note = 2'-fluoroguanosine with a 3'-phosphorothioate linkage
  modified_base 3: mod_base = cm
  modified_base 4: mod_base = gm
  modified_base 5: mod_base = OTHER; note = 2'-fluorouridine
  modified_base 6: mod_base = um
  modified_base 7: mod_base = OTHER; note = 2'-fluoroguanosine
  modified_base 8: mod_base = um
  modified_base 9: mod_base = OTHER; note = 2'-O-methyladenosine
  modified_base 10: mod_base = gm
  modified_base 11: mod_base = cm
  modified_base 12: mod_base = cm
  modified_base 13: mod_base = um
  modified_base 14: mod_base = OTHER; note = 2'-fluorocytidine
  modified_base 15: mod_base = cm
  modified_base 16: mod_base = OTHER; note = 2'-fluorouridine
  modified_base 17: mod_base = OTHER; note = 2'-O-methyladenosine
  modified_base 18: mod_base = um
  modified_base 19: mod_base = gm
  modified_base 20: mod_base = cm
  modified_base 21: mod_base = OTHER; note = 2'-O-methyluridine with a 3'-phosphorothioate linkage
  modified_base 22: mod_base = OTHER; note = 2'-O-methylcytidine with a 3'-phosphorothioate linkage
  modified_base 23: mod_base = cm
tgcgttgtagcctcctatgctcc

SEQ ID NO: 2237 - RNA, 23 nt, synthetic construct
  source 1..23: mol_type = other RNA
  modified_base 1: mod_base = OTHER; note = 2'-O-methyluridine with a 3'-phosphorothioate linkage
  modified_base 2: mod_base = OTHER; note = 2'-fluoroguanosine with a 3'-phosphorothioate linkage
  modified_base 3: mod_base = gm
  modified_base 4: mod_base = cm
  modified_base 5: mod_base = OTHER; note = 2'-fluoroguanosine
  modified_base 6: mod_base = um
  modified_base 7: mod_base = OTHER; note = 2'-fluorouridine
  modified_base 8: mod_base = gm
  modified_base 9: mod_base = um
  modified_base 10: mod_base = OTHER; note = 2'-O-methyladenosine
  modified_base 11: mod_base = gm
  modified_base 12: mod_base = cm
  modified_base 13: mod_base = cm
  modified_base 14: mod_base = OTHER; note = 2'-fluorouridine
  modified_base 15: mod_base = cm
  modified_base 16: mod_base = OTHER; note = 2'-fluorocytidine
  modified_base 17: mod_base = um
  modified_base 18: mod_base = OTHER; note = 2'-O-methyladenosine
  modified_base 19: mod_base = um
  modified_base 20: mod_base = gm
  modified_base 21: mod_base = OTHER; note = 2'-O-methylcytidine with a 3'-phosphorothioate linkage
  modified_base 22: mod_base = OTHER; note = 2'-O-methyluridine with a 3'-phosphorothioate linkage
  modified_base 23: mod_base = cm
tggcgttgtagcctcctatgctc

SEQ ID NO: 2238 - RNA, 23 nt, synthetic construct
  source 1..23: mol_type = other RNA
  modified_base 1: mod_base = OTHER; note = 2'-O-methyluridine with a 3'-phosphorothioate linkage
  modified_base 2: mod_base = OTHER; note = 2'-fluoroguanosine with a 3'-phosphorothioate linkage
  modified_base 3: mod_base = gm
  modified_base 4: mod_base = gm
  modified_base 5: mod_base = OTHER; note = 2'-fluorocytidine
  modified_base 6: mod_base = gm
  modified_base 7: mod_base = OTHER; note = 2'-fluorouridine
  modified_base 8: mod_base = um
  modified_base 9: mod_base = gm
  modified_base 10: mod_base = um
  modified_base 11: mod_base = OTHER; note = 2'-O-methyladenosine
  modified_base 12: mod_base = gm
  modified_base 13: mod_base = cm
  modified_base 14: mod_base = OTHER; note = 2'-fluorocytidine
  modified_base 15: mod_base = um
  modified_base 16: mod_base = OTHER; note = 2'-fluorocytidine
  modified_base 17: mod_base = cm
  modified_base 18: mod_base = um
  modified_base 19: mod_base = OTHER; note = 2'-O-methyladenosine
  modified_base 20: mod_base = um
  modified_base 21: mod_base = OTHER; note = 2'-O-methylguanosine with a 3'-phosphorothioate linkage
  modified_base 22: mod_base = OTHER; note = 2'-O-methylcytidine with a 3'-phosphorothioate linkage
  modified_base 23: mod_base = um
tgggcgttgtagcctcctatgct

SEQ ID NO: 2239 - RNA, 23 nt, synthetic construct
  source 1..23: mol_type = other RNA
  modified_base 1: mod_base = OTHER; note = 2'-O-methyluridine with a 3'-phosphorothioate linkage
  modified_base 2: mod_base = OTHER; note = 2'-fluorouridine with a 3'-phosphorothioate linkage
  modified_base 3: mod_base = gm
  modified_base 4: mod_base = gm
  modified_base 5: mod_base = OTHER; note = 2'-fluoroguanosine
  modified_base 6: mod_base = cm
  modified_base 7: mod_base = OTHER; note = 2'-fluoroguanosine
  modified_base 8: mod_base = um
  modified_base 9: mod_base = um
  modified_base 10: mod_base = gm
  modified_base 11: mod_base = um
  modified_base 12: mod_base = OTHER; note = 2'-O-methyladenosine
  modified_base 13: mod_base = gm
  modified_base 14: mod_base = OTHER; note = 2'-fluorocytidine
  modified_base 15: mod_base = cm
  modified_base 16: mod_base = OTHER; note = 2'-fluorouridine
  modified_base 17: mod_base = cm
  modified_base 18: mod_base = cm
  modified_base 19: mod_base = um
  modified_base 20: mod_base = OTHER; note = 2'-O-methyladenosine
  modified_base 21: mod_base = OTHER; note = 2'-O-methyluridine with a 3'-phosphorothioate linkage
  modified_base 22: mod_base = OTHER; note = 2'-O-methylguanosine with a 3'-phosphorothioate linkage
  modified_base 23: mod_base = cm
ttgggcgttgtagcctcctatgc

SEQ ID NO: 2240 - RNA, 23 nt, synthetic construct
  source 1..23: mol_type = other RNA
  modified_base 1: mod_base = OTHER; note = 2'-O-methyluridine with a 3'-phosphorothioate linkage
  modified_base 2: mod_base = OTHER; note = 2'-fluorouridine with a 3'-phosphorothioate linkage
  modified_base 3: mod_base = gm
  modified_base 4: mod_base = cm
  modified_base 5: mod_base = OTHER; note = 2'-fluoroadenosine
  modified_base 6: mod_base = um
  modified_base 7: mod_base = OTHER; note = 2'-fluoroguanosine
  modified_base 8: mod_base = gm
  modified_base 9: mod_base = gm
  modified_base 10: mod_base = cm
  modified_base 11: mod_base = gm
  modified_base 12: mod_base = um
  modified_base 13: mod_base = um
  modified_base 14: mod_base = OTHER; note = 2'-fluoroguanosine
  modified_base 15: mod_base = um
  modified_base 16: mod_base = OTHER; note = 2'-fluoroadenosine
  modified_base 17: mod_base = gm
  modified_base 18: mod_base = cm
  modified_base 19: mod_base = cm
  modified_base 20: mod_base = um
  modified_base 21: mod_base = OTHER; note = 2'-O-methylcytidine with a 3'-phosphorothioate linkage
  modified_base 22: mod_base = OTHER; note = 2'-O-methylcytidine with a 3'-phosphorothioate linkage
  modified_base 23: mod_base = um
ttgcatgggcgttgtagcctcct

SEQ ID NO: 2241 - RNA, 23 nt, synthetic construct
  source 1..23: mol_type = other RNA
  modified_base 1: mod_base = OTHER; note = 2'-O-methyluridine with a 3'-phosphorothioate linkage
  modified_base 2: mod_base = OTHER; note = 2'-fluoroguanosine with a 3'-phosphorothioate linkage
  modified_base 3: mod_base = cm
  modified_base 4: mod_base = um
  modified_base 5: mod_base = OTHER; note = 2'-fluoroguanosine
  modified_base 6: mod_base = cm
  modified_base 7: mod_base = OTHER; note = 2'-fluoroadenosine
  modified_base 8: mod_base = um
  modified_base 9: mod_base = gm
  modified_base 10: mod_base = gm
  modified_base 11: mod_base = gm
  modified_base 12: mod_base = cm
  modified_base 13: mod_base = gm
  modified_base 14: mod_base = OTHER; note = 2'-fluorouridine
  modified_base 15: mod_base = um
  modified_base 16: mod_base = OTHER; note = 2'-fluoroguanosine
  modified_base 17: mod_base = um
  modified_base 18: mod_base = OTHER; note = 2'-O-methyladenosine
  modified_base 19: mod_base = gm
  modified_base 20: mod_base = cm
  modified_base 21: mod_base = OTHER; note = 2'-O-methylcytidine with a 3'-phosphorothioate linkage
  modified_base 22: mod_base = OTHER; note = 2'-O-methyluridine with a 3'-phosphorothioate linkage
  modified_base 23: mod_base = cm
tgctgcatgggcgttgtagcctc

SEQ ID NO: 2242 - RNA, 23 nt, synthetic construct
  source 1..23: mol_type = other RNA
  modified_base 1: mod_base = OTHER; note = 2'-O-methyluridine with a 3'-phosphorothioate linkage
  modified_base 2: mod_base = OTHER; note = 2'-fluorouridine with a 3'-phosphorothioate linkage
  modified_base 3: mod_base = gm
  modified_base 4: mod_base = cm
  modified_base 5: mod_base = OTHER; note = 2'-fluorouridine
  modified_base 6: mod_base = gm
  modified_base 7: mod_base = OTHER; note = 2'-fluorocytidine
  modified_base 8: mod_base = OTHER; note = 2'-O-methyladenosine
  modified_base 9: mod_base = um
  modified_base 10: mod_base = gm
  modified_base 11: mod_base = gm
  modified_base 12: mod_base = gm
  modified_base 13: mod_base = cm
  modified_base 14: mod_base = OTHER; note = 2'-fluoroguanosine
  modified_base 15: mod_base = um
  modified_base 16: mod_base = OTHER; note = 2'-fluorouridine
  modified_base 17: mod_base = gm
  modified_base 18: mod_base = um
  modified_base 19: mod_base = OTHER; note = 2'-O-methyladenosine
  modified_base 20: mod_base = gm
  modified_base 21: mod_base = OTHER; note = 2'-O-methylcytidine with a 3'-phosphorothioate linkage
  modified_base 22: mod_base = OTHER; note = 2'-O-methylcytidine with a 3'-phosphorothioate linkage
  modified_base 23: mod_base = um
ttgctgcatgggcgttgtagcct

SEQ ID NO: 2243 - RNA, 23 nt, synthetic construct
  source 1..23: mol_type = other RNA
  modified_base 1: mod_base = OTHER; note = 2'-O-methyluridine with a 3'-phosphorothioate linkage
  modified_base 2: mod_base = OTHER; note = 2'-fluorouridine with a 3'-phosphorothioate linkage
  modified_base 3: mod_base = um
  modified_base 4: mod_base = gm
  modified_base 5: mod_base = OTHER; note = 2'-fluorocytidine
  modified_base 6: mod_base = um
  modified_base 7: mod_base = OTHER; note = 2'-fluoroguanosine
  modified_base 8: mod_base = cm
  modified_base 9: mod_base = OTHER; note = 2'-O-methyladenosine
  modified_base 10: mod_base = um
  modified_base 11: mod_base = gm
  modified_base 12: mod_base = gm
  modified_base 13: mod_base = gm
  modified_base 14: mod_base = OTHER; note = 2'-fluorocytidine
  modified_base 15: mod_base = gm
  modified_base 16: mod_base = OTHER; note = 2'-fluorouridine
  modified_base 17: mod_base = um
  modified_base 18: mod_base = gm
  modified_base 19: mod_base = um
  modified_base 20: mod_base = OTHER; note = 2'-O-methyladenosine
  modified_base 21: mod_base = OTHER; note = 2'-O-methylguanosine with a 3'-phosphorothioate linkage
  modified_base 22: mod_base = OTHER; note = 2'-O-methylcytidine with a 3'-phosphorothioate linkage
  modified_base 23: mod_base = cm
tttgctgcatgggcgttgtagcc

SEQ ID NO: 2244 - RNA, 23 nt, synthetic construct
  source 1..23: mol_type = other RNA
  modified_base 1: mod_base = OTHER; note = 2'-O-methyluridine with a 3'-phosphorothioate linkage
  modified_base 2: mod_base = OTHER; note = 2'-fluoroguanosine with a 3'-phosphorothioate linkage
  modified_base 3: mod_base = um
  modified_base 4: mod_base = um
  modified_base 5: mod_base = OTHER; note = 2'-fluorouridine
  modified_base 6: mod_base = gm
  modified_base 7: mod_base = OTHER; note = 2'-fluorocytidine
  modified_base 8: mod_base = um
  modified_base 9: mod_base = gm
  modified_base 10: mod_base = cm
  modified_base 11: mod_base = OTHER; note = 2'-O-methyladenosine
  modified_base 12: mod_base = um
  modified_base 13: mod_base = gm
  modified_base 14: mod_base = OTHER; note = 2'-fluoroguanosine
  modified_base 15: mod_base = gm
  modified_base 16: mod_base = OTHER; note = 2'-fluorocytidine
  modified_base 17: mod_base = gm
  modified_base 18: mod_base = um
  modified_base 19: mod_base = um
  modified_base 20: mod_base = gm
  modified_base 21: mod_base = OTHER; note = 2'-O-methyluridine with a 3'-phosphorothioate linkage
  modified_base 22: mod_base = OTHER; note = 2'-O-methyladenosine with a 3'-phosphorothioate linkage
  modified_base 23: mod_base = gm
tgtttgctgcatgggcgttgtag

SEQ ID NO: 2245 - RNA, 23 nt, synthetic construct
  source 1..23: mol_type = other RNA
  modified_base 1: mod_base = OTHER; note = 2'-O-methyluridine with a 3'-phosphorothioate linkage
  modified_base 2: mod_base = OTHER; note = 2'-fluorouridine with a 3'-phosphorothioate linkage
  modified_base 3: mod_base = gm
  modified_base 4: mod_base = um
  modified_base 5: mod_base = OTHER; note = 2'-fluorouridine
  modified_base 6: mod_base = um
  modified_base 7: mod_base = OTHER; note = 2'-fluoroguanosine
  modified_base 8: mod_base = cm
  modified_base 9: mod_base = um
  modified_base 10: mod_base = gm
  modified_base 11: mod_base = cm
  modified_base 12: mod_base = OTHER; note = 2'-O-methyladenosine
  modified_base 13: mod_base = um
  modified_base 14: mod_base = OTHER; note = 2'-fluoroguanosine
  modified_base 15: mod_base = gm
  modified_base 16: mod_base = OTHER; note = 2'-fluoroguanosine
  modified_base 17: mod_base = cm
  modified_base 18: mod_base = gm
  modified_base 19: mod_base = um
  modified_base 20: mod_base = um
  modified_base 21: mod_base = OTHER; note = 2'-O-methylguanosine with a 3'-phosphorothioate linkage
  modified_base 22: mod_base = OTHER; note = 2'-O-methyluridine with a 3'-phosphorothioate linkage
  modified_base 23: mod_base = OTHER; note = 2'-O-methyladenosine
ttgtttgctgcatgggcgttgta

SEQ ID NO: 2246 - RNA, 23 nt, synthetic construct
  source 1..23: mol_type = other RNA
  modified_base 1: mod_base = OTHER; note = 2'-O-methyluridine with a 3'-phosphorothioate linkage
  modified_base 2: mod_base = OTHER; note = 2'-fluoroadenosine with a 3'-phosphorothioate linkage
  modified_base 3: mod_base = um
  modified_base 4: mod_base = gm
  modified_base 5: mod_base = OTHER; note = 2'-fluorouridine
  modified_base 6: mod_base = um
  modified_base 7: mod_base = OTHER; note = 2'-fluorouridine
  modified_base 8: mod_base = gm
  modified_base 9: mod_base = cm
  modified_base 10: mod_base = um
  modified_base 11: mod_base = gm
  modified_base 12: mod_base = cm
  modified_base 13: mod_base = OTHER; note = 2'-O-methyladenosine
  modified_base 14: mod_base = OTHER; note = 2'-fluorouridine
  modified_base 15: mod_base = gm
  modified_base 16: mod_base = OTHER; note = 2'-fluoroguanosine
  modified_base 17: mod_base = gm
  modified_base 18: mod_base = cm
  modified_base 19: mod_base = gm
  modified_base 20: mod_base = um
  modified_base 21: mod_base = OTHER; note = 2'-O-methyluridine with a 3'-phosphorothioate linkage
  modified_base 22: mod_base = OTHER; note = 2'-O-methylguanosine with a 3'-phosphorothioate linkage
  modified_base 23: mod_base = um
tatgtttgctgcatgggcgttgt

SEQ ID NO: 2247 - RNA, 23 nt, synthetic construct
  source 1..23: mol_type = other RNA
  modified_base 1: mod_base = OTHER; note = 2'-O-methyluridine with a 3'-phosphorothioate linkage
  modified_base 2: mod_base = OTHER; note = 2'-fluoroguanosine with a 3'-phosphorothioate linkage
  modified_base 3: mod_base = OTHER; note = 2'-O-methyladenosine
  modified_base 4: mod_base = cm
  modified_base 5: mod_base = OTHER; note = 2'-fluoroadenosine
  modified_base 6: mod_base = OTHER; note = 2'-O-methyladenosine
  modified_base 7: mod_base = OTHER; note = 2'-fluorouridine
  modified_base 8: mod_base = gm
  modified_base 9: mod_base = um
  modified_base 10: mod_base = um
  modified_base 11: mod_base = um
  modified_base 12: mod_base = gm
  modified_base 13: mod_base = cm
  modified_base 14: mod_base = OTHER; note = 2'-fluorouridine
  modified_base 15: mod_base = gm
  modified_base 16: mod_base = OTHER; note = 2'-fluorocytidine
  modified_base 17: mod_base = OTHER; note = 2'-O-methyladenosine
  modified_base 18: mod_base = um
  modified_base 19: mod_base = gm
  modified_base 20: mod_base = gm
  modified_base 21: mod_base = OTHER; note = 2'-O-methylguanosine with a 3'-phosphorothioate linkage
  modified_base 22: mod_base = OTHER; note = 2'-O-methylcytidine with a 3'-phosphorothioate linkage
  modified_base 23: mod_base = gm
tgacaatgtttgctgcatgggcg

SEQ ID NO: 2248 - RNA, 23 nt, synthetic construct
  source 1..23: mol_type = other RNA
  modified_base 1: mod_base = OTHER; note = 2'-O-methyluridine with a 3'-phosphorothioate linkage
  modified_base 2: mod_base = OTHER; note = 2'-fluoroguanosine with a 3'-phosphorothioate linkage
  modified_base 3: mod_base = um
  modified_base 4: mod_base = gm
  modified_base 5: mod_base = OTHER; note = 2'-fluorocytidine
  modified_base 6: mod_base = um
  modified_base 7: mod_base = OTHER; note = 2'-fluoroguanosine
  modified_base 8: mod_base = cm
  modified_base 9: mod_base = OTHER; note = 2'-O-methyladenosine
  modified_base 10: mod_base = um
  modified_base 11: mod_base = cm
  modified_base 12: mod_base = cm
  modified_base 13: mod_base = um
  modified_base 14: mod_base = OTHER; note = 2'-fluoroguanosine
  modified_base 15: mod_base = um
  modified_base 16: mod_base = OTHER; note = 2'-fluorocytidine
  modified_base 17: mod_base = cm
  modified_base 18: mod_base = OTHER; note = 2'-O-methyladenosine
  modified_base 19: mod_base = cm
  modified_base 20: mod_base = OTHER; note = 2'-O-methyladenosine
  modified_base 21: mod_base = OTHER; note = 2'-O-methylguanosine with a 3'-phosphorothioate linkage
  modified_base 22: mod_base = OTHER; note = 2'-O-methylguanosine with a 3'-phosphorothioate linkage
  modified_base 23: mod_base = cm
tgtgctgcatcctgtccacaggc

SEQ ID NO: 2249 - RNA, 23 nt, synthetic construct
  source 1..23: mol_type = other RNA
  modified_base 1: mod_base = OTHER; note = 2'-O-methyluridine with a 3'-phosphorothioate linkage
  modified_base 2: mod_base = OTHER; note = 2'-fluorocytidine with a 3'-phosphorothioate linkage
  modified_base 3: mod_base = OTHER; note = 2'-O-methyladenosine
  modified_base 4: mod_base = OTHER; note = 2'-O-methyladenosine
  modified_base 5: mod_base = OTHER; note = 2'-fluorocytidine
  modified_base 6: mod_base = OTHER; note = 2'-O-methyladenosine
  modified_base 7: mod_base = OTHER; note = 2'-fluorouridine
  modified_base 8: mod_base = um
  modified_base 9: mod_base = cm
  modified_base 10: mod_base = um
  modified_base 11: mod_base = gm
  modified_base 12: mod_base = um
  modified_base 13: mod_base = gm
  modified_base 14: mod_base = OTHER; note = 2'-fluorocytidine
  modified_base 15: mod_base = um
  modified_base 16: mod_base = OTHER; note = 2'-fluoroguanosine
  modified_base 17: mod_base = cm
  modified_base 18: mod_base = OTHER; note = 2'-O-methyladenosine
  modified_base 19: mod_base = um
  modified_base 20: mod_base = cm
  modified_base 21: mod_base = OTHER; note = 2'-O-methylcytidine with a 3'-phosphorothioate linkage
  modified_base 22: mod_base = OTHER; note = 2'-O-methyluridine with a 3'-phosphorothioate linkage
  modified_base 23: mod_base = gm
tcaacattctgtgctgcatcctg

SEQ ID NO: 2250 - RNA, 23 nt, synthetic construct
  source 1..23: mol_type = other RNA
  modified_base 1: mod_base = OTHER; note = 2'-O-methyluridine with a 3'-phosphorothioate linkage
  modified_base 2: mod_base = OTHER; note = 2'-fluoroadenosine with a 3'-phosphorothioate linkage
  modified_base 3: mod_base = OTHER; note = 2'-O-methyladenosine
  modified_base 4: mod_base = um
  modified_base 5: mod_base = OTHER; note = 2'-fluoroadenosine
  modified_base 6: mod_base = cm
  modified_base 7: mod_base = OTHER; note = 2'-fluoroadenosine
  modified_base 8: mod_base = gm
  modified_base 9: mod_base = um
  modified_base 10: mod_base = um
  modified_base 11: mod_base = um
  modified_base 12: mod_base = gm
  modified_base 13: mod_base = OTHER; note = 2'-O-methyladenosine
  modified_base 14: mod_base = OTHER; note = 2'-fluoroadenosine
  modified_base 15: mod_base = cm
  modified_base 16: mod_base = OTHER; note = 2'-fluorouridine
  modified_base 17: mod_base = OTHER; note = 2'-O-methyladenosine
  modified_base 18: mod_base = cm
  modified_base 19: mod_base = cm
  modified_base 20: mod_base = OTHER; note = 2'-O-methyladenosine
  modified_base 21: mod_base = OTHER; note = 2'-O-methyladenosine with a 3'-phosphorothioate linkage
  modified_base 22: mod_base = OTHER; note = 2'-O-methylcytidine with a 3'-phosphorothioate linkage
  modified_base 23: mod_base = OTHER; note = 2'-O-methyladenosine
taatacagtttgaactaccaaca

SEQ ID NO: 2251 - RNA, 23 nt, synthetic construct
  source 1..23: mol_type = other RNA
  modified_base 1: mod_base = OTHER; note = 2'-O-methyluridine with a 3'-phosphorothioate linkage
  modified_base 2: mod_base = OTHER; note = 2'-fluorouridine with a 3'-phosphorothioate linkage
  modified_base 3: mod_base = OTHER; note = 2'-O-methyladenosine
  modified_base 4: mod_base = OTHER; note = 2'-O-methyladenosine
  modified_base 5: mod_base = OTHER; note = 2'-fluorouridine
  modified_base 6: mod_base = OTHER; note = 2'-O-methyladenosine
  modified_base 7: mod_base = OTHER; note = 2'-fluorocytidine
  modified_base 8: mod_base = OTHER; note = 2'-O-methyladenosine
  modified_base 9: mod_base = gm
  modified_base 10: mod_base = um
  modified_base 11: mod_base = um
  modified_base 12: mod_base = um
  modified_base 13: mod_base = gm
  modified_base 14: mod_base = OTHER; note = 2'-fluoroadenosine
  modified_base 15: mod_base = OTHER; note = 2'-O-methyladenosine
  modified_base 16: mod_base = OTHER; note = 2'-fluorocytidine
  modified_base 17: mod_base = um
  modified_base 18: mod_base = OTHER; note = 2'-O-methyladenosine
  modified_base 19: mod_base = cm
  modified_base 20: mod_base = cm
  modified_base 21: mod_base = OTHER; note = 2'-O-methyladenosine with a 3'-phosphorothioate linkage
  modified_base 22: mod_base = OTHER; note = 2'-O-methyladenosine with a 3'-phosphorothioate linkage
  modified_base 23: mod_base = cm
ttaatacagtttgaactaccaac

SEQ ID NO: 2252 - RNA, 23 nt, synthetic construct
  source 1..23: mol_type = other RNA
  modified_base 1: mod_base = OTHER; note = 2'-O-methyluridine with a 3'-phosphorothioate linkage
  modified_base 2: mod_base = OTHER; note = 2'-fluoroguanosine with a 3'-phosphorothioate linkage
  modified_base 3: mod_base = um
  modified_base 4: mod_base = OTHER; note = 2'-O-methyladenosine
  modified_base 5: mod_base = OTHER; note = 2'-fluoroadenosine
  modified_base 6: mod_base = um
  modified_base 7: mod_base = OTHER; note = 2'-fluoroadenosine
  modified_base 8: mod_base = cm
  modified_base 9: mod_base = OTHER; note = 2'-O-methyladenosine
  modified_base 10: mod_base = gm
  modified_base 11: mod_base = um
  modified_base 12: mod_base = um
  modified_base 13: mod_base = um
  modified_base 14: mod_base = OTHER; note = 2'-fluoroguanosine
  modified_base 15: mod_base = OTHER; note = 2'-O-methyladenosine
  modified_base 16: mod_base = OTHER; note = 2'-fluoroadenosine
  modified_base 17: mod_base = cm
  modified_base 18: mod_base = um
  modified_base 19: mod_base = OTHER; note = 2'-O-methyladenosine
  modified_base 20: mod_base = cm
  modified_base 21: mod_base = OTHER; note = 2'-O-methylcytidine with a 3'-phosphorothioate linkage
  modified_base 22: mod_base = OTHER; note = 2'-O-methyladenosine with a 3'-phosphorothioate linkage
  modified_base 23: mod_base = OTHER; note = 2'-O-methyladenosine
tgtaatacagtttgaactaccaa

SEQ ID NO: 2253 - RNA, 23 nt, synthetic construct
  source 1..23: mol_type = other RNA
  modified_base 1: mod_base = OTHER; note = 2'-O-methyluridine with a 3'-phosphorothioate linkage
  modified_base 2: mod_base = OTHER; note = 2'-fluorouridine with a 3'-phosphorothioate linkage
  modified_base 3: mod_base = gm
  modified_base 4: mod_base = cm
  modified_base 5: mod_base = OTHER; note = 2'-fluorouridine
  modified_base 6: mod_base = um
  modified_base 7: mod_base = OTHER; note = 2'-fluorocytidine
  modified_base 8: mod_base = cm
  modified_base 9: mod_base = OTHER; note = 2'-O-methyladenosine
  modified_base 10: mod_base = um
  modified_base 11: mod_base = um
  modified_base 12: mod_base = OTHER; note = 2'-O-methyladenosine
  modified_base 13: mod_base = OTHER; note = 2'-O-methyladenosine
  modified_base 14: mod_base = OTHER; note = 2'-fluoroadenosine
  modified_base 15: mod_base = gm
  modified_base 16: mod_base = OTHER; note = 2'-fluorouridine
  modified_base 17: mod_base = OTHER; note = 2'-O-methyladenosine
  modified_base 18: mod_base = OTHER; note = 2'-O-methyladenosine
  modified_base 19: mod_base = um
  modified_base 20: mod_base = OTHER; note = 2'-O-methyladenosine
  modified_base 21: mod_base = OTHER; note = 2'-O-methylcytidine with a 3'-phosphorothioate linkage
  modified_base 22: mod_base = OTHER; note = 2'-O-methyladenosine with a 3'-phosphorothioate linkage
  modified_base 23: mod_base = gm
ttgcttccattaaagtaatacag

SEQ ID NO: 2254 - RNA, 23 nt, synthetic construct
  source 1..23: mol_type = other RNA
  modified_base 1: mod_base = OTHER; note = 2'-O-methyluridine with a 3'-phosphorothioate linkage
  modified_base 2: mod_base = OTHER; note = 2'-fluorouridine with a 3'-phosphorothioate linkage
  modified_base 3: mod_base = um
  modified_base 4: mod_base = gm
  modified_base 5: mod_base = OTHER; note = 2'-fluorocytidine
  modified_base 6: mod_base = um
  modified_base 7: mod_base = OTHER; note = 2'-fluorouridine
  modified_base 8: mod_base = cm
  modified_base 9: mod_base = cm
  modified_base 10: mod_base = OTHER; note = 2'-O-methyladenosine
  modified_base 11: mod_base = um
  modified_base 12: mod_base = um
  modified_base 13: mod_base = OTHER; note = 2'-O-methyladenosine
  modified_base 14: mod_base = OTHER; note = 2'-fluoroadenosine
  modified_base 15: mod_base = OTHER; note = 2'-O-methyladenosine
  modified_base 16: mod_base = OTHER; note = 2'-fluoroguanosine
  modified_base 17: mod_base = um
  modified_base 18: mod_base = OTHER; note = 2'-O-methyladenosine
  modified_base 19: mod_base = OTHER; note = 2'-O-methyladenosine
  modified_base 20: mod_base = um
  modified_base 21: mod_base = OTHER; note = 2'-O-methyladenosine with a 3'-phosphorothioate linkage
  modified_base 22: mod_base = OTHER; note = 2'-O-methylcytidine with a 3'-phosphorothioate linkage
  modified_base 23: mod_base = OTHER; note = 2'-O-methyladenosine
tttgcttccattaaagtaataca

SEQ ID NO: 2255 - RNA, 23 nt, synthetic construct
  source 1..23: mol_type = other RNA
  modified_base 1: mod_base = OTHER; note = 2'-O-methyluridine with a 3'-phosphorothioate linkage
  modified_base 2: mod_base = OTHER; note = 2'-fluoroadenosine with a 3'-phosphorothioate linkage
  modified_base 3: mod_base = cm
  modified_base 4: mod_base = um
  modified_base 5: mod_base = OTHER; note = 2'-fluorouridine
  modified_base 6: mod_base = gm
  modified_base 7: mod_base = OTHER; note = 2'-fluorocytidine
  modified_base 8: mod_base = um
  modified_base 9: mod_base = um
  modified_base 10: mod_base = cm
  modified_base 11: mod_base = cm
  modified_base 12: mod_base = OTHER; note = 2'-O-methyladenosine
  modified_base 13: mod_base = um
  modified_base 14: mod_base = OTHER; note = 2'-fluorouridine
  modified_base 15: mod_base = OTHER; note = 2'-O-methyladenosine
  modified_base 16: mod_base = OTHER; note = 2'-fluoroadenosine
  modified_base 17: mod_base = OTHER; note = 2'-O-methyladenosine
  modified_base 18: mod_base = gm
  modified_base 19: mod_base = um
  modified_base 20: mod_base = OTHER; note = 2'-O-methyladenosine
  modified_base 21: mod_base = OTHER; note = 2'-O-methyladenosine with a 3'-phosphorothioate linkage
  modified_base 22: mod_base = OTHER; note = 2'-O-methyluridine with a 3'-phosphorothioate linkage
  modified_base 23: mod_base = OTHER; note = 2'-O-methyladenosine
tacttgcttccattaaagtaata

SEQ ID NO: 2256 - RNA, 23 nt, synthetic construct
  source 1..23: mol_type = other RNA
  modified_base 1: mod_base = OTHER; note = 2'-O-methyluridine with a 3'-phosphorothioate linkage
  modified_base 2: mod_base = OTHER; note = 2'-fluorocytidine with a 3'-phosphorothioate linkage
  modified_base 3: mod_base = OTHER; note = 2'-O-methyladenosine
  modified_base 4: mod_base = cm
  modified_base 5: mod_base = OTHER; note = 2'-fluorouridine
  modified_base 6: mod_base = um
  modified_base 7: mod_base = OTHER; note = 2'-fluoroguanosine
  modified_base 8: mod_base = cm
  modified_base 9: mod_base = um
  modified_base 10: mod_base = um
  modified_base 11: mod_base = cm
  modified_base 12: mod_base = cm
  modified_base 13: mod_base = OTHER; note = 2'-O-methyladenosine
  modified_base 14: mod_base = OTHER; note = 2'-fluorouridine
  modified_base 15: mod_base = um
  modified_base 16: mod_base = OTHER; note = 2'-fluoroadenosine
  modified_base 17: mod_base = OTHER; note = 2'-O-methyladenosine
  modified_base 18: mod_base = OTHER; note = 2'-O-methyladenosine
  modified_base 19: mod_base = gm
  modified_base 20: mod_base = um
  modified_base 21: mod_base = OTHER; note = 2'-O-methyladenosine with a 3'-phosphorothioate linkage
  modified_base 22: mod_base = OTHER; note = 2'-O-methyladenosine with a 3'-phosphorothioate linkage
  modified_base 23: mod_base = um
tcacttgcttccattaaagtaat

SEQ ID NO: 2257 - RNA, 23 nt, synthetic construct
  source 1..23: mol_type = other RNA
  modified_base 1: mod_base = OTHER; note = 2'-O-methyluridine with a 3'-phosphorothioate linkage
  modified_base 2: mod_base = OTHER; note = 2'-fluorouridine with a 3'-phosphorothioate linkage
  modified_base 3: mod_base = OTHER; note = 2'-O-methyladenosine
  modified_base 4: mod_base = OTHER; note = 2'-O-methyladenosine
  modified_base 5: mod_base = OTHER; note = 2'-fluoroadenosine
  modified_base 6: mod_base = um
  modified_base 7: mod_base = OTHER; note = 2'-fluorocytidine
  modified_base 8: mod_base = um
  modified_base 9: mod_base = um
  modified_base 10: mod_base = cm
  modified_base 11: mod_base = OTHER; note = 2'-O-methyladenosine
  modified_base 12: mod_base = um
  modified_base 13: mod_base = um
  modified_base 14: mod_base = OTHER; note = 2'-fluorouridine
  modified_base 15: mod_base = gm
  modified_base 16: mod_base = OTHER; note = 2'-fluorouridine
  modified_base 17: mod_base = gm
  modified_base 18: mod_base = gm
  modified_base 19: mod_base = gm
  modified_base 20: mod_base = OTHER; note = 2'-O-methyladenosine
  modified_base 21: mod_base = OTHER; note = 2'-O-methylcytidine with a 3'-phosphorothioate linkage
  modified_base 22: mod_base = OTHER; note = 2'-O-methylcytidine with a 3'-phosphorothioate linkage
  modified_base 23: mod_base = OTHER; note = 2'-O-methyladenosine
ttaaatcttcatttgtgggacca

SEQ ID NO: 2258 - RNA, 23 nt, synthetic construct
  source 1..23: mol_type = other RNA
  modified_base 1: mod_base = OTHER; note = 2'-O-methyluridine with a 3'-phosphorothioate linkage
  modified_base 2: mod_base = OTHER; note = 2'-fluoroguanosine with a 3'-phosphorothioate linkage
  modified_base 3: mod_base = cm
  modified_base 4: mod_base = OTHER; note = 2'-O-methyladenosine
  modified_base 5: mod_base = OTHER; note = 2'-fluoroguanosine
  modified_base 6: mod_base = cm
  modified_base 7: mod_base = OTHER; note = 2'-fluorouridine
  modified_base 8: mod_base = gm
  modified_base 9: mod_base = OTHER; note = 2'-O-methyladenosine
  modified_base 10: mod_base = um
  modified_base 11: mod_base = OTHER; note = 2'-O-methyladenosine
  modified_base 12: mod_base = um
  modified_base 13: mod_base = OTHER; note = 2'-O-methyladenosine
  modified_base 14: mod_base = OTHER; note = 2'-fluorouridine
  modified_base 15: mod_base = OTHER; note = 2'-O-methyladenosine
  modified_base 16: mod_base = OTHER; note = 2'-fluoroadenosine
  modified_base 17: mod_base = OTHER; note = 2'-O-methyladenosine
  modified_base 18: mod_base = um
  modified_base 19: mod_base = cm
  modified_base 20: mod_base = um
  modified_base 21: mod_base = OTHER; note = 2'-O-methyluridine with a 3'-phosphorothioate linkage
  modified_base 22: mod_base = OTHER; note = 2'-O-methylcytidine with a 3'-phosphorothioate linkage
  modified_base 23: mod_base = OTHER; note = 2'-O-methyladenosine
tgcagctgatatataaatcttca

SEQ ID NO: 2259 - RNA, 23 nt, synthetic construct
  source 1..23: mol_type = other RNA
  modified_base 1: mod_base = OTHER; note = 2'-O-methyluridine with a 3'-phosphorothioate linkage
  modified_base 2: mod_base = OTHER; note = 2'-fluoroadenosine with a 3'-phosphorothioate linkage
  modified_base 3: mod_base = gm
  modified_base 4: mod_base = OTHER; note = 2'-O-methyladenosine
  modified_base 5: mod_base = OTHER; note = 2'-fluorouridine
  modified_base 6: mod_base = gm
  modified_base 7: mod_base = OTHER; note = 2'-fluoroguanosine
  modified_base 8: mod_base = cm
  modified_base 9: mod_base = OTHER; note = 2'-O-methyladenosine
  modified_base 10: mod_base = um
  modified_base 11: mod_base = gm
  modified_base 12: mod_base = gm
  modified_base 13: mod_base = um
  modified_base 14: mod_base = OTHER; note = 2'-fluoroguanosine
  modified_base 15: mod_base = cm
  modified_base 16: mod_base = OTHER; note = 2'-fluoroadenosine
  modified_base 17: mod_base = gm
  modified_base 18: mod_base = cm
  modified_base 19: mod_base = um
  modified_base 20: mod_base = gm
  modified_base 21: mod_base = OTHER; note = 2'-O-methyladenosine with a 3'-phosphorothioate linkage
  modified_base 22: mod_base = OTHER; note = 2'-O-methyluridine with a 3'-phosphorothioate linkage
  modified_base 23: mod_base = OTHER; note = 2'-O-methyladenosine
tagatggcatggtgcagctgata

SEQ ID NO: 2260 - RNA, 23 nt, synthetic construct
  source 1..23: mol_type = other RNA
  modified_base 1: mod_base = OTHER; note = 2'-O-methyluridine with a 3'-phosphorothioate linkage
  modified_base 2: mod_base = OTHER; note = 2'-fluorouridine with a 3'-phosphorothioate linkage
  modified_base 3: mod_base = OTHER; note = 2'-O-methyladenosine
  modified_base 4: mod_base = gm
  modified_base 5: mod_base = OTHER; note = 2'-fluoroadenosine
  modified_base 6: mod_base = um
  modified_base 7: mod_base = OTHER; note = 2'-fluoroguanosine
  modified_base 8: mod_base = gm
  modified_base 9: mod_base = cm
  modified_base 10: mod_base = OTHER; note = 2'-O-methyladenosine
  modified_base 11: mod_base = um
  modified_base 12: mod_base = gm
  modified_base 13: mod_base = gm
  modified_base 14: mod_base = OTHER; note = 2'-fluorouridine
  modified_base 15: mod_base = gm
  modified_base 16: mod_base = OTHER; note = 2'-fluorocytidine
  modified_base 17: mod_base = OTHER; note = 2'-O-methyladenosine
  modified_base 18: mod_base = gm
  modified_base 19: mod_base = cm
  modified_base 20: mod_base = um
  modified_base 21: mod_base = OTHER; note = 2'-O-methylguanosine with a 3'-phosphorothioate linkage
  modified_base 22: mod_base = OTHER; note = 2'-O-methyladenosine with a 3'-phosphorothioate linkage
  modified_base 23: mod_base = um
ttagatggcatggtgcagctgat

SEQ ID NO: 2261 - RNA, 23 nt, synthetic construct
  source 1..23: mol_type = other RNA
  modified_base 1: mod_base = OTHER; note = 2'-O-methyluridine with a 3'-phosphorothioate linkage
  modified_base 2: mod_base = OTHER; note = 2'-fluoroadenosine with a 3'-phosphorothioate linkage
  modified_base 3: mod_base = um
  modified_base 4: mod_base = OTHER; note = 2'-O-methyladenosine
  modified_base 5: mod_base = OTHER; note = 2'-fluoroguanosine
  modified_base 6: mod_base = OTHER; note = 2'-O-methyladenosine
  modified_base 7: mod_base = OTHER; note = 2'-fluorouridine
  modified_base 8: mod_base = gm
  modified_base 9: mod_base = gm
  modified_base 10: mod_base = cm
  modified_base 11: mod_base = OTHER; note = 2'-O-methyladenosine
  modified_base 12: mod_base = um
  modified_base 13: mod_base = gm
  modified_base 14: mod_base = OTHER; note = 2'-fluoroguanosine
  modified_base 15: mod_base = um
  modified_base 16: mod_base = OTHER; note = 2'-fluoroguanosine
  modified_base 17: mod_base = cm
  modified_base 18: mod_base = OTHER; note = 2'-O-methyladenosine
  modified_base 19: mod_base = gm
  modified_base 20: mod_base = cm
  modified_base 21: mod_base = OTHER; note = 2'-O-methyluridine with a 3'-phosphorothioate linkage
  modified_base 22: mod_base = OTHER; note = 2'-O-methylguanosine with a 3'-phosphorothioate linkage
  modified_base 23: mod_base = OTHER; note = 2'-O-methyladenosine
tatagatggcatggtgcagctga

SEQ ID NO: 2262 - RNA, 23 nt, synthetic construct
  source 1..23: mol_type = other RNA
  modified_base 1: mod_base = OTHER; note = 2'-O-methyluridine with a 3'-phosphorothioate linkage
  modified_base 2: mod_base = OTHER; note = 2'-fluorouridine with a 3'-phosphorothioate linkage
  modified_base 3: mod_base = OTHER; note = 2'-O-methyladenosine
  modified_base 4: mod_base = um
  modified_base 5: mod_base = OTHER; note = 2'-fluoroadenosine
  modified_base 6: mod_base = gm
  modified_base 7: mod_base = OTHER; note = 2'-fluoroadenosine
  modified_base 8: mod_base = um
  modified_base 9: mod_base = gm
  modified_base 10: mod_base = gm
  modified_base 11: mod_base = cm
  modified_base 12: mod_base = OTHER; note = 2'-O-methyladenosine
  modified_base 13: mod_base = um
  modified_base 14: mod_base = OTHER; note = 2'-fluoroguanosine
  modified_base 15: mod_base = gm
  modified_base 16: mod_base = OTHER; note = 2'-fluorouridine
  modified_base 17: mod_base = gm
  modified_base 18: mod_base = cm
  modified_base 19: mod_base = OTHER; note = 2'-O-methyladenosine
  modified_base 20: mod_base = gm
  modified_base 21: mod_base = OTHER; note = 2'-O-methylcytidine with a 3'-phosphorothioate linkage
  modified_base 22: mod_base = OTHER; note = 2'-O-methyluridine with a 3'-phosphorothioate linkage
  modified_base 23: mod_base = gm
ttatagatggcatggtgcagctg

SEQ ID NO: 2263 - RNA, 23 nt, synthetic construct
  source 1..23: mol_type = other RNA
  modified_base 1: mod_base = OTHER; note = 2'-O-methyluridine with a 3'-phosphorothioate linkage
  modified_base 2: mod_base = OTHER; note = 2'-fluorocytidine with a 3'-phosphorothioate linkage
  modified_base 3: mod_base = um
  modified_base 4: mod_base = OTHER; note = 2'-O-methyladenosine
  modified_base 5: mod_base = OTHER; note = 2'-fluorouridine
  modified_base 6: mod_base = OTHER; note = 2'-O-methyladenosine
  modified_base 7: mod_base = OTHER; note = 2'-fluoroguanosine
  modified_base 8: mod_base = OTHER; note = 2'-O-methyladenosine
  modified_base 9: mod_base = um
  modified_base 10: mod_base = gm
  modified_base 11: mod_base = gm
  modified_base 12: mod_base = cm
  modified_base 13: mod_base = OTHER; note = 2'-O-methyladenosine
  modified_base 14: mod_base = OTHER; note = 2'-fluorouridine
  modified_base 15: mod_base = gm
  modified_base 16: mod_base = OTHER; note = 2'-fluoroguanosine
  modified_base 17: mod_base = um
  modified_base 18: mod_base = gm
  modified_base 19: mod_base = cm
  modified_base 20: mod_base = OTHER; note = 2'-O-methyladenosine
  modified_base 21: mod_base = OTHER; note = 2'-O-methylguanosine with a 3'-phosphorothioate linkage
  modified_base 22: mod_base = OTHER; note = 2'-O-methylcytidine with a 3'-phosphorothioate linkage
  modified_base 23: mod_base = um
tctatagatggcatggtgcagct

SEQ ID NO: 2264 - RNA, 23 nt, synthetic construct
  source 1..23: mol_type = other RNA
  modified_base 1: mod_base = OTHER; note = 2'-O-methyluridine with a 3'-phosphorothioate linkage
  modified_base 2: mod_base = OTHER; note = 2'-fluorouridine with a 3'-phosphorothioate linkage
  modified_base 3: mod_base = cm
  modified_base 4: mod_base = um
  modified_base 5: mod_base = OTHER; note = 2'-fluoroadenosine
  modified_base 6: mod_base = um
  modified_base 7: mod_base = OTHER; note = 2'-fluoroadenosine
  modified_base 8: mod_base = gm
  modified_base 9: mod_base = OTHER; note = 2'-O-methyladenosine
  modified_base 10: mod_base = um
  modified_base 11: mod_base = gm
  modified_base 12: mod_base = gm
  modified_base 13: mod_base = cm
  modified_base 14: mod_base = OTHER; note = 2'-fluoroadenosine
  modified_base 15: mod_base = um
  modified_base 16: mod_base = OTHER; note = 2'-fluoroguanosine
  modified_base 17: mod_base = gm
  modified_base 18: mod_base = um
  modified_base 19: mod_base = gm
  modified_base 20: mod_base = cm
  modified_base 21: mod_base = OTHER; note = 2'-O-methyladenosine with a 3'-phosphorothioate linkage
  modified_base 22: mod_base = OTHER; note = 2'-O-methylguanosine with a 3'-phosphorothioate linkage
  modified_base 23: mod_base = cm
ttctatagatggcatggtgcagc

SEQ ID NO: 2265 - RNA, 23 nt, synthetic construct
  source 1..23: mol_type = other RNA
  modified_base 1: mod_base = OTHER; note = 2'-O-methyluridine with a 3'-phosphorothioate linkage
  modified_base 2: mod_base = OTHER; note = 2'-fluorocytidine with a 3'-phosphorothioate linkage
  modified_base 3: mod_base = um
  modified_base 4: mod_base = cm
  modified_base 5: mod_base = OTHER; note = 2'-fluorouridine
  modified_base 6: mod_base = OTHER; note = 2'-O-methyladenosine
  modified_base 7: mod_base = OTHER; note = 2'-fluorouridine
  modified_base 8: mod_base = OTHER; note = 2'-O-methyladenosine
  modified_base 9: mod_base = gm
  modified_base 10: mod_base = OTHER; note = 2'-O-methyladenosine
  modified_base 11: mod_base = um
  modified_base 12: mod_base = gm
  modified_base 13: mod_base = gm
  modified_base 14: mod_base = OTHER; note = 2'-fluorocytidine
  modified_base 15: mod_base = OTHER; note = 2'-O-methyladenosine
  modified_base 16: mod_base = OTHER; note = 2'-fluorouridine
  modified_base 17: mod_base = gm
  modified_base 18: mod_base = gm
  modified_base 19: mod_base = um
  modified_base 20: mod_base = gm
  modified_base 21: mod_base = OTHER; note = 2'-O-methylcytidine with a 3'-phosphorothioate linkage
  modified_base 22: mod_base = OTHER; note = 2'-O-methyladenosine with a 3'-phosphorothioate linkage
  modified_base 23: mod_base = gm
tctctatagatggcatggtgcag

SEQ ID NO: 2266 - RNA, 23 nt, synthetic construct
  source 1..23: mol_type = other RNA
  modified_base 1: mod_base = OTHER; note = 2'-O-methyluridine with a 3'-phosphorothioate linkage
  modified_base 2: mod_base = OTHER; note = 2'-fluorouridine with a 3'-phosphorothioate linkage
  modified_base 3: mod_base = cm
  modified_base 4: mod_base = um
  modified_base 5: mod_base = OTHER; note = 2'-fluorocytidine
  modified_base 6: mod_base = um
  modified_base 7: mod_base = OTHER; note = 2'-fluoroadenosine
  modified_base 8: mod_base = um
  modified_base 9: mod_base = OTHER; note = 2'-O-methyladenosine
  modified_base 10: mod_base = gm
  modified_base 11: mod_base = OTHER; note = 2'-O-methyladenosine
  modified_base 12: mod_base = um
  modified_base 13: mod_base = gm
  modified_base 14: mod_base = OTHER; note = 2'-fluoroguanosine
  modified_base 15: mod_base = cm
  modified_base 16: mod_base = OTHER; note = 2'-fluoroadenosine
  modified_base 17: mod_base = um
  modified_base 18: mod_base = gm
  modified_base 19: mod_base = gm
  modified_base 20: mod_base = um
  modified_base 21: mod_base = OTHER; note = 2'-O-methylguanosine with a 3'-phosphorothioate linkage
  modified_base 22: mod_base = OTHER; note = 2'-O-methylcytidine with a 3'-phosphorothioate linkage
  modified_base 23: mod_base = OTHER; note = 2'-O-methyladenosine
ttctctatagatggcatggtgca

SEQ ID NO: 2267 - RNA, 23 nt, synthetic construct
  source 1..23: mol_type = other RNA
  modified_base 1: mod_base = OTHER; note = 2'-O-methyluridine with a 3'-phosphorothioate linkage
  modified_base 2: mod_base = OTHER; note = 2'-fluorocytidine with a 3'-phosphorothioate linkage
  modified_base 3: mod_base = cm
  modified_base 4: mod_base = um
  modified_base 5: mod_base = OTHER; note = 2'-fluoroadenosine
  modified_base 6: mod_base = um
  modified_base 7: mod_base = OTHER; note = 2'-fluorocytidine
  modified_base 8: mod_base = um
  modified_base 9: mod_base = cm
  modified_base 10: mod_base = um
  modified_base 11: mod_base = OTHER; note = 2'-O-methyladenosine
  modified_base 12: mod_base = um
  modified_base 13: mod_base = OTHER; note = 2'-O-methyladenosine
  modified_base 14: mod_base = OTHER; note = 2'-fluoroguanosine
  modified_base 15: mod_base = OTHER; note = 2'-O-methyladenosine
  modified_base 16: mod_base = OTHER; note = 2'-fluorouridine
  modified_base 17: mod_base = gm
  modified_base 18: mod_base = gm
  modified_base 19: mod_base = cm
  modified_base 20: mod_base = OTHER; note = 2'-O-methyladenosine
  modified_base 21: mod_base = OTHER; note = 2'-O-methyluridine with a 3'-phosphorothioate linkage
  modified_base 22: mod_base = OTHER; note = 2'-O-methylguanosine with a 3'-phosphorothioate linkage
  modified_base 23: mod_base = gm
tcctatctctatagatggcatgg

SEQ ID NO: 2268 - RNA, 23 nt, synthetic construct
  source 1..23: mol_type = other RNA
  modified_base 1: mod_base = OTHER; note = 2'-O-methyluridine with a 3'-phosphorothioate linkage
  modified_base 2: mod_base = OTHER; note = 2'-fluorocytidine with a 3'-phosphorothioate linkage
  modified_base 3: mod_base = OTHER; note = 2'-O-methyladenosine
  modified_base 4: mod_base = cm
  modified_base 5: mod_base = OTHER; note = 2'-fluorocytidine
  modified_base 6: mod_base = gm
  modified_base 7: mod_base = OTHER; note = 2'-fluorouridine
  modified_base 8: mod_base = um
  modified_base 9: mod_base = cm
  modified_base 10: mod_base = cm
  modified_base 11: mod_base = um
  modified_base 12: mod_base = OTHER; note = 2'-O-methyladenosine
  modified_base 13: mod_base = um
  modified_base 14: mod_base = OTHER; note = 2'-fluorocytidine
  modified_base 15: mod_base = um
  modified_base 16: mod_base = OTHER; note = 2'-fluorocytidine
  modified_base 17: mod_base = um
  modified_base 18: mod_base = OTHER; note = 2'-O-methyladenosine
  modified_base 19: mod_base = um
  modified_base 20: mod_base = OTHER; note = 2'-O-methyladenosine
  modified_base 21: mod_base = OTHER; note = 2'-O-methylguanosine with a 3'-phosphorothioate linkage
  modified_base 22: mod_base = OTHER; note = 2'-O-methyladenosine with a 3'-phosphorothioate linkage
  modified_base 23: mod_base = um
tcaccgttcctatctctatagat

SEQ ID NO: 2269 - RNA, 23 nt, synthetic construct
  source 1..23: mol_type = other RNA
  modified_base 1: mod_base = OTHER; note = 2'-O-methyluridine with a 3'-phosphorothioate linkage
  modified_base 2: mod_base = OTHER; note = 2'-fluorocytidine with a 3'-phosphorothioate linkage
  modified_base 3: mod_base = cm
  modified_base 4: mod_base = OTHER; note = 2'-O-methyladenosine
  modified_base 5: mod_base = OTHER; note = 2'-fluorocytidine
  modified_base 6: mod_base = cm
  modified_base 7: mod_base = OTHER; note = 2'-fluoroguanosine
  modified_base 8: mod_base = um
  modified_base 9: mod_base = um
  modified_base 10: mod_base = cm
  modified_base 11: mod_base = cm
  modified_base 12: mod_base = um
  modified_base 13: mod_base = OTHER; note = 2'-O-methyladenosine
  modified_base 14: mod_base = OTHER; note = 2'-fluorouridine
  modified_base 15: mod_base = cm
  modified_base 16: mod_base = OTHER; note = 2'-fluorouridine
  modified_base 17: mod_base = cm
  modified_base 18: mod_base = um
  modified_base 19: mod_base = OTHER; note = 2'-O-methyladenosine
  modified_base 20: mod_base = um
  modified_base 21: mod_base = OTHER; note = 2'-O-methyladenosine with a 3'-phosphorothioate linkage
  modified_base 22: mod_base = OTHER; note = 2'-O-methylguanosine with a 3'-phosphorothioate linkage
  modified_base 23: mod_base = OTHER; note = 2'-O-methyladenosine
tccaccgttcctatctctataga

SEQ ID NO: 2270 - RNA, 23 nt, synthetic construct
  source 1..23: mol_type = other RNA
  modified_base 1: mod_base = OTHER; note = 2'-O-methyluridine with a 3'-phosphorothioate linkage
  modified_base 2: mod_base = OTHER; note = 2'-fluorocytidine with a 3'-phosphorothioate linkage
  modified_base 3: mod_base = cm
  modified_base 4: mod_base = cm
  modified_base 5: mod_base = OTHER; note = 2'-fluoroadenosine
  modified_base 6: mod_base = cm
  modified_base 7: mod_base = OTHER; note = 2'-fluorocytidine
  modified_base 8: mod_base = gm
  modified_base 9: mod_base = um
  modified_base 10: mod_base = um
  modified_base 11: mod_base = cm
  modified_base 12: mod_base = cm
  modified_base 13: mod_base = um
  modified_base 14: mod_base = OTHER; note = 2'-fluoroadenosine
  modified_base 15: mod_base = um
  modified_base 16: mod_base = OTHER; note = 2'-fluorocytidine
  modified_base 17: mod_base = um
  modified_base 18: mod_base = cm
  modified_base 19: mod_base = um
  modified_base 20: mod_base = OTHER; note = 2'-O-methyladenosine
  modified_base 21: mod_base = OTHER; note = 2'-O-methyluridine with a 3'-phosphorothioate linkage
  modified_base 22: mod_base = OTHER; note = 2'-O-methyladenosine with a 3'-phosphorothioate linkage
  modified_base 23: mod_base = gm
tcccaccgttcctatctctatag

SEQ ID NO: 2271 - RNA, 23 nt, synthetic construct
  source 1..23: mol_type = other RNA
  modified_base 1: mod_base = OTHER; note = 2'-O-methyluridine with a 3'-phosphorothioate linkage
  modified_base 2: mod_base = OTHER; note = 2'-fluoroadenosine with a 3'-phosphorothioate linkage
  modified_base 3: mod_base = cm
  modified_base 4: mod_base = OTHER; note = 2'-O-methyladenosine
  modified_base 5: mod_base = OTHER; note = 2'-fluoroguanosine
  modified_base 6: mod_base = gm
  modified_base 7: mod_base = OTHER; note = 2'-fluorocytidine
  modified_base 8: mod_base = um
  modified_base 9: mod_base = um
  modified_base 10: mod_base = gm
  modified_base 11: mod_base = cm
  modified_base 12: mod_base = um
  modified_base 13: mod_base = gm
  modified_base 14: mod_base = OTHER; note = 2'-fluoroadenosine
  modified_base 15: mod_base = gm
  modified_base 16: mod_base = OTHER; note = 2'-fluoroguanosine
  modified_base 17: mod_base = um
  modified_base 18: mod_base = OTHER; note = 2'-O-methyladenosine
  modified_base 19: mod_base = gm
  modified_base 20: mod_base = um
  modified_base 21: mod_base = OTHER; note = 2'-O-methyladenosine with a 3'-phosphorothioate linkage
  modified_base 22: mod_base = OTHER; note = 2'-O-methylguanosine with a 3'-phosphorothioate linkage
  modified_base 23: mod_base = gm
tacaggcttgctgaggtagtagg

SEQ ID NO: 2272 - RNA, 23 nt, synthetic construct
  source 1..23: mol_type = other RNA
  modified_base 1: mod_base = OTHER; note = 2'-O-methyluridine with a 3'-phosphorothioate linkage
  modified_base 2: mod_base = OTHER; note = 2'-fluoroadenosine with a 3'-phosphorothioate linkage
  modified_base 3: mod_base = OTHER; note = 2'-O-methyladenosine
  modified_base 4: mod_base = cm
  modified_base 5: mod_base = OTHER; note = 2'-fluoroadenosine
  modified_base 6: mod_base = cm
  modified_base 7: mod_base = OTHER; note = 2'-fluorocytidine
  modified_base 8: mod_base = um
  modified_base 9: mod_base = OTHER; note = 2'-O-methyladenosine
  modified_base 10: mod_base = gm
  modified_base 11: mod_base = cm
  modified_base 12: mod_base = OTHER; note = 2'-O-methyladenosine
  modified_base 13: mod_base = um
  modified_base 14: mod_base = OTHER; note = 2'-fluorocytidine
  modified_base 15: mod_base = um
  modified_base 16: mod_base = OTHER; note = 2'-fluoroguanosine
  modified_base 17: mod_base = cm
  modified_base 18: mod_base = OTHER; note = 2'-O-methyladenosine
  modified_base 19: mod_base = OTHER; note = 2'-O-methyladenosine
  modified_base 20: mod_base = OTHER; note = 2'-O-methyladenosine
  modified_base 21: mod_base = OTHER; note = 2'-O-methylcytidine with a 3'-phosphorothioate linkage
  modified_base 22: mod_base = OTHER; note = 2'-O-methyladenosine with a 3'-phosphorothioate linkage
  modified_base 23: mod_base = gm
taacacctagcatctgcaaacag

SEQ ID NO: 2273 - RNA, 23 nt, synthetic construct
  source 1..23: mol_type = other RNA
  modified_base 1: mod_base = OTHER; note = 2'-O-methyluridine with a 3'-phosphorothioate linkage
  modified_base 2: mod_base = OTHER; note = 2'-fluoroadenosine with a 3'-phosphorothioate linkage
  modified_base 3: mod_base = um
  modified_base 4: mod_base = cm
  modified_base 5: mod_base = OTHER; note = 2'-fluorouridine
  modified_base 6: mod_base = um
  modified_base 7: mod_base = OTHER; note = 2'-fluorouridine
  modified_base 8: mod_base = gm
  modified_base 9: mod_base = cm
  modified_base 10: mod_base = OTHER; note = 2'-O-methyladenosine
  modified_base 11: mod_base = um
  modified_base 12: mod_base = gm
  modified_base 13: mod_base = cm
  modified_base 14: mod_base = OTHER; note = 2'-fluorouridine
  modified_base 15: mod_base = cm
  modified_base 16: mod_base = OTHER; note = 2'-fluorocytidine
  modified_base 17: mod_base = um
  modified_base 18: mod_base = um
  modified_base 19: mod_base = gm
  modified_base 20: mod_base = OTHER; note = 2'-O-methyladenosine
  modified_base 21: mod_base = OTHER; note = 2'-O-methyladenosine with a 3'-phosphorothioate linkage
  modified_base 22: mod_base = OTHER; note = 2'-O-methylcytidine with a 3'-phosphorothioate linkage
  modified_base 23: mod_base = OTHER; note = 2'-O-methyladenosine
tatctttgcatgctccttgaaca

SEQ ID NO: 2274 - RNA, 23 nt, synthetic construct
  source 1..23: mol_type = other RNA
  modified_base 1: mod_base = OTHER; note = 2'-O-methyluridine with a 3'-phosphorothioate linkage
  modified_base 2: mod_base = OTHER; note = 2'-fluorouridine with a 3'-phosphorothioate linkage
  modified_base 3: mod_base = OTHER; note = 2'-O-methyladenosine
  modified_base 4: mod_base = um
  modified_base 5: mod_base = OTHER; note = 2'-fluorocytidine
  modified_base 6: mod_base = um
  modified_base 7: mod_base = OTHER; note = 2'-fluorouridine
  modified_base 8: mod_base = um
  modified_base 9: mod_base = gm
  modified_base 10: mod_base = cm
  modified_base 11: mod_base = OTHER; note = 2'-O-methyladenosine
  modified_base 12: mod_base = um
  modified_base 13: mod_base = gm
  modified_base 14: mod_base = OTHER; note = 2'-fluorocytidine
  modified_base 15: mod_base = um
  modified_base 16: mod_base = OTHER; note = 2'-fluorocytidine
  modified_base 17: mod_base = cm
  modified_base 18: mod_base = um
  modified_base 19: mod_base = um
  modified_base 20: mod_base = gm
  modified_base 21: mod_base = OTHER; note = 2'-O-methyladenosine with a 3'-phosphorothioate linkage
  modified_base 22: mod_base = OTHER; note = 2'-O-methyladenosine with a 3'-phosphorothioate linkage
  modified_base 23: mod_base = cm
ttatctttgcatgctccttgaac

SEQ ID NO: 2275 - RNA, 23 nt, synthetic construct
  source 1..23: mol_type = other RNA
  modified_base 1: mod_base = OTHER; note = 2'-O-methyluridine with a 3'-phosphorothioate linkage
  modified_base 2: mod_base = OTHER; note = 2'-fluorouridine with a 3'-phosphorothioate linkage
  modified_base 3: mod_base = um
  modified_base 4: mod_base = OTHER; note = 2'-O-methyladenosine
  modified_base 5: mod_base = OTHER; note = 2'-fluorouridine
  modified_base 6: mod_base = cm
  modified_base 7: mod_base = OTHER; note = 2'-fluorouridine
  modified_base 8: mod_base = um
  modified_base 9: mod_base = um
  modified_base 10: mod_base = gm
  modified_base 11: mod_base = cm
  modified_base 12: mod_base = OTHER; note = 2'-O-methyladenosine
  modified_base 13: mod_base = um
  modified_base 14: mod_base = OTHER; note = 2'-fluoroguanosine
  modified_base 15: mod_base = cm
  modified_base 16: mod_base = OTHER; note = 2'-fluorouridine
  modified_base 17: mod_base = cm
  modified_base 18: mod_base = cm
  modified_base 19: mod_base = um
  modified_base 20: mod_base = um
  modified_base 21: mod_base = OTHER; note = 2'-O-methylguanosine with a 3'-phosphorothioate linkage
  modified_base 22: mod_base = OTHER; note = 2'-O-methyladenosine with a 3'-phosphorothioate linkage
  modified_base 23: mod_base = OTHER; note = 2'-O-methyladenosine
tttatctttgcatgctccttgaa

SEQ ID NO: 2276 - RNA, 23 nt, synthetic construct
  source 1..23: mol_type = other RNA
  modified_base 1: mod_base = OTHER; note = 2'-O-methyluridine with a 3'-phosphorothioate linkage
  modified_base 2: mod_base = OTHER; note = 2'-fluoroadenosine with a 3'-phosphorothioate linkage
  modified_base 3: mod_base = um
  modified_base 4: mod_base = um
  modified_base 5: mod_base = OTHER; note = 2'-fluoroadenosine
  modified_base 6: mod_base = um
  modified_base 7: mod_base = OTHER; note = 2'-fluorocytidine
  modified_base 8: mod_base = um
  modified_base 9: mod_base = um
  modified_base 10: mod_base = um
  modified_base 11: mod_base = gm
  modified_base 12: mod_base = cm
  modified_base 13: mod_base = OTHER; note = 2'-O-methyladenosine
  modified_base 14: mod_base = OTHER; note = 2'-fluorouridine
  modified_base 15: mod_base = gm
  modified_base 16: mod_base = OTHER; note = 2'-fluorocytidine
  modified_base 17: mod_base = um
  modified_base 18: mod_base = cm
  modified_base 19: mod_base = cm
  modified_base 20: mod_base = um
  modified_base 21: mod_base = OTHER; note = 2'-O-methyluridine with a 3'-phosphorothioate linkage
  modified_base 22: mod_base = OTHER; note = 2'-O-methylguanosine with a 3'-phosphorothioate linkage
  modified_base 23: mod_base = OTHER; note = 2'-O-methyladenosine
tattatctttgcatgctccttga

SEQ ID NO: 2277 - RNA, 23 nt, synthetic construct
  source 1..23: mol_type = other RNA
  modified_base 1: mod_base = OTHER; note = 2'-O-methyluridine with a 3'-phosphorothioate linkage
  modified_base 2: mod_base = OTHER; note = 2'-fluoroguanosine with a 3'-phosphorothioate linkage
  modified_base 3: mod_base = OTHER; note = 2'-O-methyladenosine
  modified_base 4: mod_base = um
  modified_base 5: mod_base = OTHER; note = 2'-fluorouridine
  modified_base 6: mod_base = OTHER; note = 2'-O-methyladenosine
  modified_base 7: mod_base = OTHER; note = 2'-fluorouridine
  modified_base 8: mod_base = cm
  modified_base 9: mod_base = um
  modified_base 10: mod_base = um
  modified_base 11: mod_base = um
  modified_base 12: mod_base = gm
  modified_base 13: mod_base = cm
  modified_base 14: mod_base = OTHER; note = 2'-fluoroadenosine
  modified_base 15: mod_base = um
  modified_base 16: mod_base = OTHER; note = 2'-fluoroguanosine
  modified_base 17: mod_base = cm
  modified_base 18: mod_base = um
  modified_base 19: mod_base = cm
  modified_base 20: mod_base = cm
  modified_base 21: mod_base = OTHER; note = 2'-O-methyluridine with a 3'-phosphorothioate linkage
  modified_base 22: mod_base = OTHER; note = 2'-O-methyluridine with a 3'-phosphorothioate linkage
  modified_base 23: mod_base = gm
tgattatctttgcatgctccttg

SEQ ID NO: 2278 - RNA, 23 nt, synthetic construct
  source 1..23: mol_type = other RNA
  modified_base 1: mod_base = OTHER; note = 2'-O-methyluridine with a 3'-phosphorothioate linkage
  modified_base 2: mod_base = OTHER; note = 2'-fluoroguanosine with a 3'-phosphorothioate linkage
  modified_base 3: mod_base = gm
  modified_base 4: mod_base = OTHER; note = 2'-O-methyladenosine
  modified_base 5: mod_base = OTHER; note = 2'-fluorouridine
  modified_base 6: mod_base = um
  modified_base 7: mod_base = OTHER; note = 2'-fluoroadenosine
  modified_base 8: mod_base = um
  modified_base 9: mod_base = cm
  modified_base 10: mod_base = um
  modified_base 11: mod_base = um
  modified_base 12: mod_base = um
  modified_base 13: mod_base = gm
  modified_base 14: mod_base = OTHER; note = 2'-fluorocytidine
  modified_base 15: mod_base = OTHER; note = 2'-O-methyladenosine
  modified_base 16: mod_base = OTHER; note = 2'-fluorouridine
  modified_base 17: mod_base = gm
  modified_base 18: mod_base = cm
  modified_base 19: mod_base = um
  modified_base 20: mod_base = cm
  modified_base 21: mod_base = OTHER; note = 2'-O-methylcytidine with a 3'-phosphorothioate linkage
  modified_base 22: mod_base = OTHER; note = 2'-O-methyluridine with a 3'-phosphorothioate linkage
  modified_base 23: mod_base = um
tggattatctttgcatgctcctt

SEQ ID NO: 2279 - RNA, 23 nt, synthetic construct
  source 1..23: mol_type = other RNA
  modified_base 1: mod_base = OTHER; note = 2'-O-methyluridine with a 3'-phosphorothioate linkage
  modified_base 2: mod_base = OTHER; note = 2'-fluorouridine with a 3'-phosphorothioate linkage
  modified_base 3: mod_base = um
  modified_base 4: mod_base = cm
  modified_base 5: mod_base = OTHER; note = 2'-fluoroguanosine
  modified_base 6: mod_base = gm
  modified_base 7: mod_base = OTHER; note = 2'-fluoroguanosine
  modified_base 8: mod_base = cm
  modified_base 9: mod_base = OTHER; note = 2'-O-methyladenosine
  modified_base 10: mod_base = OTHER; note = 2'-O-methyladenosine
  modified_base 11: mod_base = gm
  modified_base 12: mod_base = cm
  modified_base 13: mod_base = um
  modified_base 14: mod_base = OTHER; note = 2'-fluoroguanosine
  modified_base 15: mod_base = cm
  modified_base 16: mod_base = OTHER; note = 2'-fluorocytidine
  modified_base 17: mod_base = gm
  modified_base 18: mod_base = gm
  modified_base 19: mod_base = gm
  modified_base 20: mod_base = cm
  modified_base 21: mod_base = OTHER; note = 2'-O-methyladenosine with a 3'-phosphorothioate linkage
  modified_base 22: mod_base = OTHER; note = 2'-O-methyluridine with a 3'-phosphorothioate linkage
  modified_base 23: mod_base = um
tttcgggcaagctgccgggcatt

SEQ ID NO: 2280 - RNA, 23 nt, synthetic construct
  source 1..23: mol_type = other RNA
  modified_base 1: mod_base = OTHER; note = 2'-O-methyluridine with a 3'-phosphorothioate linkage
  modified_base 2: mod_base = OTHER; note = 2'-fluorocytidine with a 3'-phosphorothioate linkage
  modified_base 3: mod_base = OTHER; note = 2'-O-methyladenosine
  modified_base 4: mod_base = cm
  modified_base 5: mod_base = OTHER; note = 2'-fluoroadenosine
  modified_base 6: mod_base = OTHER; note = 2'-O-methyladenosine
  modified_base 7: mod_base = OTHER; note = 2'-fluorouridine
  modified_base 8: mod_base = um
  modified_base 9: mod_base = cm
  modified_base 10: mod_base = gm
  modified_base 11: mod_base = gm
  modified_base 12: mod_base = gm
  modified_base 13: mod_base = cm
  modified_base 14: mod_base = OTHER; note = 2'-fluoroadenosine
  modified_base 15: mod_base = OTHER; note = 2'-O-methyladenosine
  modified_base 16: mod_base = OTHER; note = 2'-fluoroguanosine
  modified_base 17: mod_base = cm
  modified_base 18: mod_base = um
  modified_base 19: mod_base = gm
  modified_base 20: mod_base = cm
  modified_base 21: mod_base = OTHER; note = 2'-O-methylcytidine with a 3'-phosphorothioate linkage
  modified_base 22: mod_base = OTHER; note = 2'-O-methylguanosine with a 3'-phosphorothioate linkage
  modified_base 23: mod_base = gm
tcacaattcgggcaagctgccgg

SEQ ID NO: 2281 - RNA, 23 nt, synthetic construct
  source 1..23: mol_type = other RNA
  modified_base 1: mod_base = OTHER; note = 2'-O-methyluridine with a 3'-phosphorothioate linkage
  modified_base 2: mod_base = OTHER; note = 2'-fluoroadenosine with a 3'-phosphorothioate linkage
  modified_base 3: mod_base = cm
  modified_base 4: mod_base = OTHER; note = 2'-O-methyladenosine
  modified_base 5: mod_base = OTHER; note = 2'-fluorocytidine
  modified_base 6: mod_base = OTHER; note = 2'-O-methyladenosine
  modified_base 7: mod_base = OTHER; note = 2'-fluoroadenosine
  modified_base 8: mod_base = um
  modified_base 9: mod_base = um
  modified_base 10: mod_base = cm
  modified_base 11: mod_base = gm
  modified_base 12: mod_base = gm
  modified_base 13: mod_base = gm
  modified_base 14: mod_base = OTHER; note = 2'-fluorocytidine
  modified_base 15: mod_base = OTHER; note = 2'-O-methyladenosine
  modified_base 16: mod_base = OTHER; note = 2'-fluoroadenosine
  modified_base 17: mod_base = gm
  modified_base 18: mod_base = cm
  modified_base 19: mod_base = um
  modified_base 20: mod_base = gm
  modified_base 21: mod_base = OTHER; note = 2'-O-methylcytidine with a 3'-phosphorothioate linkage
  modified_base 22: mod_base = OTHER; note = 2'-O-methylcytidine with a 3'-phosphorothioate linkage
  modified_base 23: mod_base = gm
tacacaattcgggcaagctgccg

SEQ ID NO: 2282 - RNA, 23 nt, synthetic construct
  source 1..23: mol_type = other RNA
  modified_base 1: mod_base = OTHER; note = 2'-O-methyluridine with a 3'-phosphorothioate linkage
  modified_base 2: mod_base = OTHER; note = 2'-fluorocytidine with a 3'-phosphorothioate linkage
  modified_base 3: mod_base = OTHER; note = 2'-O-methyladenosine
  modified_base 4: mod_base = cm
  modified_base 5: mod_base = OTHER; note = 2'-fluoroadenosine
  modified_base 6: mod_base = cm
  modified_base 7: mod_base = OTHER; note = 2'-fluoroadenosine
  modified_base 8: mod_base = OTHER; note = 2'-O-methyladenosine
  modified_base 9: mod_base = um
  modified_base 10: mod_base = um
  modified_base 11: mod_base = cm
  modified_base 12: mod_base = gm
  modified_base 13: mod_base = gm
  modified_base 14: mod_base = OTHER; note = 2'-fluoroguanosine
  modified_base 15: mod_base = cm
  modified_base 16: mod_base = OTHER; note = 2'-fluoroadenosine
  modified_base 17: mod_base = OTHER; note = 2'-O-methyladenosine
  modified_base 18: mod_base = gm
  modified_base 19: mod_base = cm
  modified_base 20: mod_base = um
  modified_base 21: mod_base = OTHER; note = 2'-O-methylguanosine with a 3'-phosphorothioate linkage
  modified_base 22: mod_base = OTHER; note = 2'-O-methylcytidine with a 3'-phosphorothioate linkage
  modified_base 23: mod_base = cm
tcacacaattcgggcaagctgcc

SEQ ID NO: 2283 - RNA, 23 nt, synthetic construct
  source 1..23: mol_type = other RNA
  modified_base 1: mod_base = OTHER; note = 2'-O-methyluridine with a 3'-phosphorothioate linkage
  modified_base 2: mod_base = OTHER; note = 2'-fluoroguanosine with a 3'-phosphorothioate linkage
  modified_base 3: mod_base = um
  modified_base 4: mod_base = cm
  modified_base 5: mod_base = OTHER; note = 2'-fluorocytidine
  modified_base 6: mod_base = um
  modified_base 7: mod_base = OTHER; note = 2'-fluoroguanosine
  modified_base 8: mod_base = cm
  modified_base 9: mod_base = um
  modified_base 10: mod_base = gm
  modified_base 11: mod_base = cm
  modified_base 12: mod_base = cm
  modified_base 13: mod_base = OTHER; note = 2'-O-methyladenosine
  modified_base 14: mod_base = OTHER; note = 2'-fluoroadenosine
  modified_base 15: mod_base = um
  modified_base 16: mod_base = OTHER; note = 2'-fluoroguanosine
  modified_base 17: mod_base = cm
  modified_base 18: mod_base = um
  modified_base 19: mod_base = gm
  modified_base 20: mod_base = cm
  modified_base 21: mod_base = OTHER; note = 2'-O-methylcytidine with a 3'-phosphorothioate linkage
  modified_base 22: mod_base = OTHER; note = 2'-O-methyladenosine with a 3'-phosphorothioate linkage
  modified_base 23: mod_base = um
tgtcctgctgccaatgctgccat

SEQ ID NO: 2284 - RNA, 23 nt, synthetic construct
  source 1..23: mol_type = other RNA
  modified_base 1: mod_base = OTHER; note = 2'-O-methyluridine with a 3'-phosphorothioate linkage
  modified_base 2: mod_base = OTHER; note = 2'-fluorouridine with a 3'-phosphorothioate linkage
  modified_base 3: mod_base = gm
  modified_base 4: mod_base = um
  modified_base 5: mod_base = OTHER; note = 2'-fluorocytidine
  modified_base 6: mod_base = cm
  modified_base 7: mod_base = OTHER; note = 2'-fluorouridine
  modified_base 8: mod_base = gm
  modified_base 9: mod_base = cm
  modified_base 10: mod_base = um
  modified_base 11: mod_base = gm
  modified_base 12: mod_base = cm
  modified_base 13: mod_base = cm
  modified_base 14: mod_base = OTHER; note = 2'-fluoroadenosine
  modified_base 15: mod_base = OTHER; note = 2'-O-methyladenosine
  modified_base 16: mod_base = OTHER; note = 2'-fluorouridine
  modified_base 17: mod_base = gm
  modified_base 18: mod_base = cm
  modified_base 19: mod_base = um
  modified_base 20: mod_base = gm
  modified_base 21: mod_base = OTHER; note = 2'-O-methylcytidine with a 3'-phosphorothioate linkage
  modified_base 22: mod_base = OTHER; note = 2'-O-methylcytidine with a 3'-phosphorothioate linkage
  modified_base 23: mod_base = OTHER; note = 2'-O-methyladenosine
ttgtcctgctgccaatgctgcca

SEQ ID NO: 2285 - RNA, 23 nt, synthetic construct
  source 1..23: mol_type = other RNA
  modified_base 1: mod_base = OTHER; note = 2'-O-methyluridine with a 3'-phosphorothioate linkage
  modified_base 2: mod_base = OTHER; note = 2'-fluoroadenosine with a 3'-phosphorothioate linkage
  modified_base 3: mod_base = um
  modified_base 4: mod_base = gm
  modified_base 5: mod_base = OTHER; note = 2'-fluorouridine
  modified_base 6: mod_base = cm
  modified_base 7: mod_base = OTHER; note = 2'-fluorocytidine
  modified_base 8: mod_base = um
  modified_base 9: mod_base = gm
  modified_base 10: mod_base = cm
  modified_base 11: mod_base = um
  modified_base 12: mod_base = gm
  modified_base 13: mod_base = cm
  modified_base 14: mod_base = OTHER; note = 2'-fluorocytidine
  modified_base 15: mod_base = OTHER; note = 2'-O-methyladenosine
  modified_base 16: mod_base = OTHER; note = 2'-fluoroadenosine
  modified_base 17: mod_base = um
  modified_base 18: mod_base = gm
  modified_base 19: mod_base = cm
  modified_base 20: mod_base = um
  modified_base 21: mod_base = OTHER; note = 2'-O-methylguanosine with a 3'-phosphorothioate linkage
  modified_base 22: mod_base = OTHER; note = 2'-O-methylcytidine with a 3'-phosphorothioate linkage
  modified_base 23: mod_base = cm
tatgtcctgctgccaatgctgcc

SEQ ID NO: 2286 - RNA, 23 nt, synthetic construct
  source 1..23: mol_type = other RNA
  modified_base 1: mod_base = OTHER; note = 2'-O-methyluridine with a 3'-phosphorothioate linkage
  modified_base 2: mod_base = OTHER; note = 2'-fluorouridine with a 3'-phosphorothioate linkage
  modified_base 3: mod_base = um
  modified_base 4: mod_base = um
  modified_base 5: mod_base = OTHER; note = 2'-fluoroguanosine
  modified_base 6: mod_base = OTHER; note = 2'-O-methyladenosine
  modified_base 7: mod_base = OTHER; note = 2'-fluorocytidine
  modified_base 8: mod_base = OTHER; note = 2'-O-methyladenosine
  modified_base 9: mod_base = OTHER; note = 2'-O-methyladenosine
  modified_base 10: mod_base = gm
  modified_base 11: mod_base = OTHER; note = 2'-O-methyladenosine
  modified_base 12: mod_base = um
  modified_base 13: mod_base = gm
  modified_base 14: mod_base = OTHER; note = 2'-fluorouridine
  modified_base 15: mod_base = cm
  modified_base 16: mod_base = OTHER; note = 2'-fluorocytidine
  modified_base 17: mod_base = um
  modified_base 18: mod_base = gm
  modified_base 19: mod_base = cm
  modified_base 20: mod_base = um
  modified_base 21: mod_base = OTHER; note = 2'-O-methylguanosine with a 3'-phosphorothioate linkage
  modified_base 22: mod_base = OTHER; note = 2'-O-methylcytidine with a 3'-phosphorothioate linkage
  modified_base 23: mod_base = cm
ttttgacaagatgtcctgctgcc

SEQ ID NO: 2287 - RNA, 23 nt, synthetic construct
  source 1..23: mol_type = other RNA
  modified_base 1: mod_base = OTHER; note = 2'-O-methyluridine with a 3'-phosphorothioate linkage
  modified_base 2: mod_base = OTHER; note = 2'-fluorouridine with a 3'-phosphorothioate linkage
  modified_base 3: mod_base = um
  modified_base 4: mod_base = um
  modified_base 5: mod_base = OTHER; note = 2'-fluorouridine
  modified_base 6: mod_base = gm
  modified_base 7: mod_base = OTHER; note = 2'-fluoroadenosine
  modified_base 8: mod_base = cm
  modified_base 9: mod_base = OTHER; note = 2'-O-methyladenosine
  modified_base 10: mod_base = OTHER; note = 2'-O-methyladenosine
  modified_base 11: mod_base = gm
  modified_base 12: mod_base = OTHER; note = 2'-O-methyladenosine
  modified_base 13: mod_base = um
  modified_base 14: mod_base = OTHER; note = 2'-fluoroguanosine
  modified_base 15: mod_base = um
  modified_base 16: mod_base = OTHER; note = 2'-fluorocytidine
  modified_base 17: mod_base = cm
  modified_base 18: mod_base = um
  modified_base 19: mod_base = gm
  modified_base 20: mod_base = cm
  modified_base 21: mod_base = OTHER; note = 2'-O-methyluridine with a 3'-phosphorothioate linkage
  modified_base 22: mod_base = OTHER; note = 2'-O-methylguanosine with a 3'-phosphorothioate linkage
  modified_base 23: mod_base = cm
tttttgacaagatgtcctgctgc

SEQ ID NO: 2288 - RNA, 23 nt, synthetic construct
  source 1..23: mol_type = other RNA
  modified_base 1: mod_base = OTHER; note = 2'-O-methyluridine with a 3'-phosphorothioate linkage
  modified_base 2: mod_base = OTHER; note = 2'-fluoroadenosine with a 3'-phosphorothioate linkage
  modified_base 3: mod_base = cm
  modified_base 4: mod_base = um
  modified_base 5: mod_base = OTHER; note = 2'-fluorouridine
  modified_base 6: mod_base = um
  modified_base 7: mod_base = OTHER; note = 2'-fluorouridine
  modified_base 8: mod_base = gm
  modified_base 9: mod_base = OTHER; note = 2'-O-methyladenosine
  modified_base 10: mod_base = cm
  modified_base 11: mod_base = OTHER; note = 2'-O-methyladenosine
  modified_base 12: mod_base = OTHER; note = 2'-O-methyladenosine
  modified_base 13: mod_base = gm
  modified_base 14: mod_base = OTHER; note = 2'-fluoroadenosine
  modified_base 15: mod_base = um
  modified_base 16: mod_base = OTHER; note = 2'-fluoroguanosine
  modified_base 17: mod_base = um
  modified_base 18: mod_base = cm
  modified_base 19: mod_base = cm
  modified_base 20: mod_base = um
  modified_base 21: mod_base = OTHER; note = 2'-O-methylguanosine with a 3'-phosphorothioate linkage
  modified_base 22: mod_base = OTHER; note = 2'-O-methylcytidine with a 3'-phosphorothioate linkage
  modified_base 23: mod_base = um
tacttttgacaagatgtcctgct

SEQ ID NO: 2289 - RNA, 23 nt, synthetic construct
  source 1..23: mol_type = other RNA
  modified_base 1: mod_base = OTHER; note = 2'-O-methyluridine with a 3'-phosphorothioate linkage
  modified_base 2: mod_base = OTHER; note = 2'-fluoroguanosine with a 3'-phosphorothioate linkage
  modified_base 3: mod_base = OTHER; note = 2'-O-methyladenosine
  modified_base 4: mod_base = cm
  modified_base 5: mod_base = OTHER; note = 2'-fluorouridine
  modified_base 6: mod_base = um
  modified_base 7: mod_base = OTHER; note = 2'-fluorouridine
  modified_base 8: mod_base = um
  modified_base 9: mod_base = gm
  modified_base 10: mod_base = OTHER; note = 2'-O-methyladenosine
  modified_base 11: mod_base = cm
  modified_base 12: mod_base = OTHER; note = 2'-O-methyladenosine
  modified_base 13: mod_base = OTHER; note = 2'-O-methyladenosine
  modified_base 14: mod_base = OTHER; note = 2'-fluoroguanosine
  modified_base 15: mod_base = OTHER; note = 2'-O-methyladenosine
  modified_base 16: mod_base = OTHER; note = 2'-fluorouridine
  modified_base 17: mod_base = gm
  modified_base 18: mod_base = um
  modified_base 19: mod_base = cm
  modified_base 20: mod_base = cm
  modified_base 21: mod_base = OTHER; note = 2'-O-methyluridine with a 3'-phosphorothioate linkage
  modified_base 22: mod_base = OTHER; note = 2'-O-methylguanosine with a 3'-phosphorothioate linkage
  modified_base 23: mod_base = cm
tgacttttgacaagatgtcctgc

SEQ ID NO: 2290 - RNA, 23 nt, synthetic construct
  source 1..23: mol_type = other RNA
  modified_base 1: mod_base = OTHER; note = 2'-O-methyluridine with a 3'-phosphorothioate linkage
  modified_base 2: mod_base = OTHER; note = 2'-fluorouridine with a 3'-phosphorothioate linkage
  modified_base 3: mod_base = gm
  modified_base 4: mod_base = OTHER; note = 2'-O-methyladenosine
  modified_base 5: mod_base = OTHER; note = 2'-fluorocytidine
  modified_base 6: mod_base = um
  modified_base 7: mod_base = OTHER; note = 2'-fluorouridine
  modified_base 8: mod_base = um
  modified_base 9: mod_base = um
  modified_base 10: mod_base = gm
  modified_base 11: mod_base = OTHER; note = 2'-O-methyladenosine
  modified_base 12: mod_base = cm
  modified_base 13: mod_base = OTHER; note = 2'-O-methyladenosine
  modified_base 14: mod_base = OTHER; note = 2'-fluoroadenosine
  modified_base 15: mod_base = gm
  modified_base 16: mod_base = OTHER; note = 2'-fluoroadenosine
  modified_base 17: mod_base = um
  modified_base 18: mod_base = gm
  modified_base 19: mod_base = um
  modified_base 20: mod_base = cm
  modified_base 21: mod_base = OTHER; note = 2'-O-methylcytidine with a 3'-phosphorothioate linkage
  modified_base 22: mod_base = OTHER; note = 2'-O-methyluridine with a 3'-phosphorothioate linkage
  modified_base 23: mod_base = gm
ttgacttttgacaagatgtcctg

SEQ ID NO: 2291 - RNA, 23 nt, synthetic construct
  source 1..23: mol_type = other RNA
  modified_base 1: mod_base = OTHER; note = 2'-O-methyluridine with a 3'-phosphorothioate linkage
  modified_base 2: mod_base = OTHER; note = 2'-fluoroadenosine with a 3'-phosphorothioate linkage
  modified_base 3: mod_base = gm
  modified_base 4: mod_base = um
  modified_base 5: mod_base = OTHER; note = 2'-fluorouridine
  modified_base 6: mod_base = cm
  modified_base 7: mod_base = OTHER; note = 2'-fluorouridine
  modified_base 8: mod_base = OTHER; note = 2'-O-methyladenosine
  modified_base 9: mod_base = cm
  modified_base 10: mod_base = OTHER; note = 2'-O-methyladenosine
  modified_base 11: mod_base = um
  modified_base 12: mod_base = cm
  modified_base 13: mod_base = cm
  modified_base 14: mod_base = OTHER; note = 2'-fluorocytidine
  modified_base 15: mod_base = OTHER; note = 2'-O-methyladenosine
  modified_base 16: mod_base = OTHER; note = 2'-fluoroguanosine
  modified_base 17: mod_base = OTHER; note = 2'-O-methyladenosine
  modified_base 18: mod_base = cm
  modified_base 19: mod_base = um
  modified_base 20: mod_base = um
  modified_base 21: mod_base = OTHER; note = 2'-O-methyladenosine with a 3'-phosphorothioate linkage
  modified_base 22: mod_base = OTHER; note = 2'-O-methyladenosine with a 3'-phosphorothioate linkage
  modified_base 23: mod_base = um
tagttctacatcccagacttaat

SEQ ID NO: 2292 - RNA, 23 nt, synthetic construct
  source 1..23: mol_type = other RNA
  modified_base 1: mod_base = OTHER; note = 2'-O-methyluridine with a 3'-phosphorothioate linkage
  modified_base 2: mod_base = OTHER; note = 2'-fluoroguanosine with a 3'-phosphorothioate linkage
  modified_base 3: mod_base = gm
  modified_base 4: mod_base = cm
  modified_base 5: mod_base = OTHER; note = 2'-fluorocytidine
  modified_base 6: mod_base = um
  modified_base 7: mod_base = OTHER; note = 2'-fluorocytidine
  modified_base 8: mod_base = um
  modified_base 9: mod_base = cm
  modified_base 10: mod_base = um
  modified_base 11: mod_base = gm
  modified_base 12: mod_base = OTHER; note = 2'-O-methyladenosine
  modified_base 13: mod_base = OTHER; note = 2'-O-methyladenosine
  modified_base 14: mod_base = OTHER; note = 2'-fluorocytidine
  modified_base 15: mod_base = OTHER; note = 2'-O-methyladenosine
  modified_base 16: mod_base = OTHER; note = 2'-fluoroadenosine
  modified_base 17: mod_base = OTHER; note = 2'-O-methyladenosine
  modified_base 18: mod_base = um
  modified_base 19: mod_base = OTHER; note = 2'-O-methyladenosine
  modified_base 20: mod_base = gm
  modified_base 21: mod_base = OTHER; note = 2'-O-methylcytidine with a 3'-phosphorothioate linkage
  modified_base 22: mod_base = OTHER; note = 2'-O-methylcytidine with a 3'-phosphorothioate linkage
  modified_base 23: mod_base = um
tggcctctctgaacaaatagcct

SEQ ID NO: 2293 - RNA, 23 nt, synthetic construct
  source 1..23: mol_type = other RNA
  modified_base 1: mod_base = OTHER; note = 2'-O-methyluridine with a 3'-phosphorothioate linkage
  modified_base 2: mod_base = OTHER; note = 2'-fluoroadenosine with a 3'-phosphorothioate linkage
  modified_base 3: mod_base = gm
  modified_base 4: mod_base = gm
  modified_base 5: mod_base = OTHER; note = 2'-fluorocytidine
  modified_base 6: mod_base = cm
  modified_base 7: mod_base = OTHER; note = 2'-fluorouridine
  modified_base 8: mod_base = cm
  modified_base 9: mod_base = um
  modified_base 10: mod_base = cm
  modified_base 11: mod_base = um
  modified_base 12: mod_base = gm
  modified_base 13: mod_base = OTHER; note = 2'-O-methyladenosine
  modified_base 14: mod_base = OTHER; note = 2'-fluoroadenosine
  modified_base 15: mod_base = cm
  modified_base 16: mod_base = OTHER; note = 2'-fluoroadenosine
  modified_base 17: mod_base = OTHER; note = 2'-O-methyladenosine
  modified_base 18: mod_base = OTHER; note = 2'-O-methyladenosine
  modified_base 19: mod_base = um
  modified_base 20: mod_base = OTHER; note = 2'-O-methyladenosine
  modified_base 21: mod_base = OTHER; note = 2'-O-methylguanosine with a 3'-phosphorothioate linkage
  modified_base 22: mod_base = OTHER; note = 2'-O-methylcytidine with a 3'-phosphorothioate linkage
  modified_base 23: mod_base = cm
taggcctctctgaacaaatagcc

SEQ ID NO: 2294 - RNA, 23 nt, synthetic construct
  source 1..23: mol_type = other RNA
  modified_base 1: mod_base = OTHER; note = 2'-O-methyluridine with a 3'-phosphorothioate linkage
  modified_base 2: mod_base = OTHER; note = 2'-fluorouridine with a 3'-phosphorothioate linkage
  modified_base 3: mod_base = OTHER; note = 2'-O-methyladenosine
  modified_base 4: mod_base = um
  modified_base 5: mod_base = OTHER; note = 2'-fluorouridine
  modified_base 6: mod_base = um
  modified_base 7: mod_base = OTHER; note = 2'-fluorocytidine
  modified_base 8: mod_base = um
  modified_base 9: mod_base = um
  modified_base 10: mod_base = gm
  modified_base 11: mod_base = OTHER; note = 2'-O-methyladenosine
  modified_base 12: mod_base = OTHER; note = 2'-O-methyladenosine
  modified_base 13: mod_base = cm
  modified_base 14: mod_base = OTHER; note = 2'-fluoroadenosine
  modified_base 15: mod_base = cm
  modified_base 16: mod_base = OTHER; note = 2'-fluorouridine
  modified_base 17: mod_base = um
  modified_base 18: mod_base = cm
  modified_base 19: mod_base = cm
  modified_base 20: mod_base = OTHER; note = 2'-O-methyladenosine
  modified_base 21: mod_base = OTHER; note = 2'-O-methyladenosine with a 3'-phosphorothioate linkage
  modified_base 22: mod_base = OTHER; note = 2'-O-methyluridine with a 3'-phosphorothioate linkage
  modified_base 23: mod_base = OTHER; note = 2'-O-methyladenosine
ttatttcttgaacacttccaata

SEQ ID NO: 2295 - RNA, 23 nt, synthetic construct
  source 1..23: mol_type = other RNA
  modified_base 1: mod_base = OTHER; note = 2'-O-methyluridine with a 3'-phosphorothioate linkage
  modified_base 2: mod_base = OTHER; note = 2'-fluorouridine with a 3'-phosphorothioate linkage
  modified_base 3: mod_base = um
  modified_base 4: mod_base = OTHER; note = 2'-O-methyladenosine
  modified_base 5: mod_base = OTHER; note = 2'-fluorouridine
  modified_base 6: mod_base = um
  modified_base 7: mod_base = OTHER; note = 2'-fluorouridine
  modified_base 8: mod_base = cm
  modified_base 9: mod_base = um
  modified_base 10: mod_base = um
  modified_base 11: mod_base = gm
  modified_base 12: mod_base = OTHER; note = 2'-O-methyladenosine
  modified_base 13: mod_base = OTHER; note = 2'-O-methyladenosine
  modified_base 14: mod_base = OTHER; note = 2'-fluorocytidine
  modified_base 15: mod_base = OTHER; note = 2'-O-methyladenosine
  modified_base 16: mod_base = OTHER; note = 2'-fluorocytidine
  modified_base 17: mod_base = um
  modified_base 18: mod_base = um
  modified_base 19: mod_base = cm
  modified_base 20: mod_base = cm
  modified_base 21: mod_base = OTHER; note = 2'-O-methyladenosine with a 3'-phosphorothioate linkage
  modified_base 22: mod_base = OTHER; note = 2'-O-methyladenosine with a 3'-phosphorothioate linkage
  modified_base 23: mod_base = um
tttatttcttgaacacttccaat

SEQ ID NO: 2296 - RNA, 23 nt, synthetic construct
  source 1..23: mol_type = other RNA
  modified_base 1: mod_base = OTHER; note = 2'-O-methyluridine with a 3'-phosphorothioate linkage
  modified_base 2: mod_base = OTHER; note = 2'-fluorouridine with a 3'-phosphorothioate linkage
  modified_base 3: mod_base = OTHER; note = 2'-O-methyladenosine
  modified_base 4: mod_base = gm
  modified_base 5: mod_base = OTHER; note = 2'-fluoroadenosine
  modified_base 6: mod_base = gm
  modified_base 7: mod_base = OTHER; note = 2'-fluorouridine
  modified_base 8: mod_base = OTHER; note = 2'-O-methyladenosine
  modified_base 9: mod_base = um
  modified_base 10: mod_base = um
  modified_base 11: mod_base = um
  modified_base 12: mod_base = um
  modified_base 13: mod_base = OTHER; note = 2'-O-methyladenosine
  modified_base 14: mod_base = OTHER; note = 2'-fluorouridine
  modified_base 15: mod_base = cm
  modified_base 16: mod_base = OTHER; note = 2'-fluoroadenosine
  modified_base 17: mod_base = gm
  modified_base 18: mod_base = um
  modified_base 19: mod_base = OTHER; note = 2'-O-methyladenosine
  modified_base 20: mod_base = cm
  modified_base 21: mod_base = OTHER; note = 2'-O-methyladenosine with a 3'-phosphorothioate linkage
  modified_base 22: mod_base = OTHER; note = 2'-O-methylcytidine with a 3'-phosphorothioate linkage
  modified_base 23: mod_base = OTHER; note = 2'-O-methyladenosine
ttagagtattttatcagtacaca

SEQ ID NO: 2297 - RNA, 23 nt, synthetic construct
  source 1..23: mol_type = other RNA
  modified_base 1: mod_base = OTHER; note = 2'-O-methyluridine with a 3'-phosphorothioate linkage
  modified_base 2: mod_base = OTHER; note = 2'-fluorocytidine with a 3'-phosphorothioate linkage
  modified_base 3: mod_base = OTHER; note = 2'-O-methyladenosine
  modified_base 4: mod_base = OTHER; note = 2'-O-methyladenosine
  modified_base 5: mod_base = OTHER; note = 2'-fluoroguanosine
  modified_base 6: mod_base = cm
  modified_base 7: mod_base = OTHER; note = 2'-fluoroadenosine
  modified_base 8: mod_base = OTHER; note = 2'-O-methyladenosine
  modified_base 9: mod_base = gm
  modified_base 10: mod_base = cm
  modified_base 11: mod_base = cm
  modified_base 12: mod_base = OTHER; note = 2'-O-methyladenosine
  modified_base 13: mod_base = gm
  modified_base 14: mod_base = OTHER; note = 2'-fluoroguanosine
  modified_base 15: mod_base = gm
  modified_base 16: mod_base = OTHER; note = 2'-fluorouridine
  modified_base 17: mod_base = um
  modified_base 18: mod_base = um
  modified_base 19: mod_base = cm
  modified_base 20: mod_base = cm
  modified_base 21: mod_base = OTHER; note = 2'-O-methyluridine with a 3'-phosphorothioate linkage
  modified_base 22: mod_base = OTHER; note = 2'-O-methylguanosine with a 3'-phosphorothioate linkage
  modified_base 23: mod_base = gm
tcaagcaagccagggtttcctgg

SEQ ID NO: 2298 - RNA, 23 nt, synthetic construct
  source 1..23: mol_type = other RNA
  modified_base 1: mod_base = OTHER; note = 2'-O-methyluridine with a 3'-phosphorothioate linkage
  modified_base 2: mod_base = OTHER; note = 2'-fluorouridine with a 3'-phosphorothioate linkage
  modified_base 3: mod_base = gm
  modified_base 4: mod_base = gm
  modified_base 5: mod_base = OTHER; note = 2'-fluorocytidine
  modified_base 6: mod_base = cm
  modified_base 7: mod_base = OTHER; note = 2'-fluoroadenosine
  modified_base 8: mod_base = cm
  modified_base 9: mod_base = OTHER; note = 2'-O-methyladenosine
  modified_base 10: mod_base = gm
  modified_base 11: mod_base = gm
  modified_base 12: mod_base = OTHER; note = 2'-O-methyladenosine
  modified_base 13: mod_base = OTHER; note = 2'-O-methyladenosine
  modified_base 14: mod_base = OTHER; note = 2'-fluorocytidine
  modified_base 15: mod_base = um
  modified_base 16: mod_base = OTHER; note = 2'-fluoroadenosine
  modified_base 17: mod_base = gm
  modified_base 18: mod_base = gm
  modified_base 19: mod_base = cm
  modified_base 20: mod_base = OTHER; note = 2'-O-methyladenosine
  modified_base 21: mod_base = OTHER; note = 2'-O-methylcytidine with a 3'-phosphorothioate linkage
  modified_base 22: mod_base = OTHER; note = 2'-O-methyladenosine with a 3'-phosphorothioate linkage
  modified_base 23: mod_base = gm
ttggccacaggaactaggcacag

SEQ ID NO: 2299 - RNA, 23 nt, synthetic construct
  source 1..23: mol_type = other RNA
  modified_base 1: mod_base = OTHER; note = 2'-O-methyluridine with a 3'-phosphorothioate linkage
  modified_base 2: mod_base = OTHER; note = 2'-fluoroadenosine with a 3'-phosphorothioate linkage
  modified_base 3: mod_base = OTHER; note = 2'-O-methyladenosine
  modified_base 4: mod_base = cm
  modified_base 5: mod_base = OTHER; note = 2'-fluorocytidine
  modified_base 6: mod_base = um
  modified_base 7: mod_base = OTHER; note = 2'-fluorocytidine
  modified_base 8: mod_base = cm
  modified_base 9: mod_base = um
  modified_base 10: mod_base = gm
  modified_base 11: mod_base = gm
  modified_base 12: mod_base = cm
  modified_base 13: mod_base = cm
  modified_base 14: mod_base = OTHER; note = 2'-fluoroadenosine
  modified_base 15: mod_base = cm
  modified_base 16: mod_base = OTHER; note = 2'-fluoroadenosine
  modified_base 17: mod_base = gm
  modified_base 18: mod_base = gm
  modified_base 19: mod_base = OTHER; note = 2'-O-methyladenosine
  modified_base 20: mod_base = OTHER; note = 2'-O-methyladenosine
  modified_base 21: mod_base = OTHER; note = 2'-O-methylcytidine with a 3'-phosphorothioate linkage
  modified_base 22: mod_base = OTHER; note = 2'-O-methyluridine with a 3'-phosphorothioate linkage
  modified_base 23: mod_base = OTHER; note = 2'-O-methyladenosine
taacctcctggccacaggaacta

SEQ ID NO: 2300 - RNA, 23 nt, synthetic construct
  source 1..23: mol_type = other RNA
  modified_base 1: mod_base = OTHER; note = 2'-O-methyluridine with a 3'-phosphorothioate linkage
  modified_base 2: mod_base = OTHER; note = 2'-fluorocytidine with a 3'-phosphorothioate linkage
  modified_base 3: mod_base = OTHER; note = 2'-O-methyladenosine
  modified_base 4: mod_base = cm
  modified_base 5: mod_base = OTHER; note = 2'-fluorocytidine
  modified_base 6: mod_base = OTHER; note = 2'-O-methyladenosine
  modified_base 7: mod_base = OTHER; note = 2'-fluoroadenosine
  modified_base 8: mod_base = cm
  modified_base 9: mod_base = cm
  modified_base 10: mod_base = um
  modified_base 11: mod_base = cm
  modified_base 12: mod_base = cm
  modified_base 13: mod_base = um
  modified_base 14: mod_base = OTHER; note = 2'-fluoroguanosine
  modified_base 15: mod_base = gm
  modified_base 16: mod_base = OTHER; note = 2'-fluorocytidine
  modified_base 17: mod_base = cm
  modified_base 18: mod_base = OTHER; note = 2'-O-methyladenosine
  modified_base 19: mod_base = cm
  modified_base 20: mod_base = OTHER; note = 2'-O-methyladenosine
  modified_base 21: mod_base = OTHER; note = 2'-O-methylguanosine with a 3'-phosphorothioate linkage
  modified_base 22: mod_base = OTHER; note = 2'-O-methylguanosine with a 3'-phosphorothioate linkage
  modified_base 23: mod_base = OTHER; note = 2'-O-methyladenosine
tcaccaacctcctggccacagga

SEQ ID NO: 2301 - RNA, 23 nt, synthetic construct
  source 1..23: mol_type = other RNA
  modified_base 1: mod_base = OTHER; note = 2'-O-methyluridine with a 3'-phosphorothioate linkage
  modified_base 2: mod_base = OTHER; note = 2'-fluorouridine with a 3'-phosphorothioate linkage
  modified_base 3: mod_base = cm
  modified_base 4: mod_base = OTHER; note = 2'-O-methyladenosine
  modified_base 5: mod_base = OTHER; note = 2'-fluoroguanosine
  modified_base 6: mod_base = um
  modified_base 7: mod_base = OTHER; note = 2'-fluorocytidine
  modified_base 8: mod_base = OTHER; note = 2'-O-methyladenosine
  modified_base 9: mod_base = cm
  modified_base 10: mod_base = cm
  modified_base 11: mod_base = OTHER; note = 2'-O-methyladenosine
  modified_base 12: mod_base = OTHER; note = 2'-O-methyladenosine
  modified_base 13: mod_base = cm
  modified_base 14: mod_base = OTHER; note = 2'-fluorocytidine
  modified_base 15: mod_base = um
  modified_base 16: mod_base = OTHER; note = 2'-fluorocytidine
  modified_base 17: mod_base = cm
  modified_base 18: mod_base = um
  modified_base 19: mod_base = gm
  modified_base 20: mod_base = gm
  modified_base 21: mod_base = OTHER; note = 2'-O-methylcytidine with a 3'-phosphorothioate linkage
  modified_base 22: mod_base = OTHER; note = 2'-O-methylcytidine with a 3'-phosphorothioate linkage
  modified_base 23: mod_base = OTHER; note = 2'-O-methyladenosine
ttcagtcaccaacctcctggcca

SEQ ID NO: 2302 - RNA, 23 nt, synthetic construct
  source 1..23: mol_type = other RNA
  modified_base 1: mod_base = OTHER; note = 2'-O-methyluridine with a 3'-phosphorothioate linkage
  modified_base 2: mod_base = OTHER; note = 2'-fluoroadenosine with a 3'-phosphorothioate linkage
  modified_base 3: mod_base = um
  modified_base 4: mod_base = um
  modified_base 5: mod_base = OTHER; note = 2'-fluoroadenosine
  modified_base 6: mod_base = OTHER; note = 2'-O-methyladenosine
  modified_base 7: mod_base = OTHER; note = 2'-fluoroguanosine
  modified_base 8: mod_base = OTHER; note = 2'-O-methyladenosine
  modified_base 9: mod_base = um
  modified_base 10: mod_base = um
  modified_base 11: mod_base = cm
  modified_base 12: mod_base = OTHER; note = 2'-O-methyladenosine
  modified_base 13: mod_base = OTHER; note = 2'-O-methyladenosine
  modified_base 14: mod_base = OTHER; note = 2'-fluorouridine
  modified_base 15: mod_base = OTHER; note = 2'-O-methyladenosine
  modified_base 16: mod_base = OTHER; note = 2'-fluoroadenosine
  modified_base 17: mod_base = cm
  modified_base 18: mod_base = um
  modified_base 19: mod_base = cm
  modified_base 20: mod_base = um
  modified_base 21: mod_base = OTHER; note = 2'-O-methylguanosine with a 3'-phosphorothioate linkage
  modified_base 22: mod_base = OTHER; note = 2'-O-methylcytidine with a 3'-phosphorothioate linkage
  modified_base 23: mod_base = um
tattaagattcaataactctgct

SEQ ID NO: 2303 - RNA, 23 nt, synthetic construct
  source 1..23: mol_type = other RNA
  modified_base 1: mod_base = OTHER; note = 2'-O-methyluridine with a 3'-phosphorothioate linkage
  modified_base 2: mod_base = OTHER; note = 2'-fluoroadenosine with a 3'-phosphorothioate linkage
  modified_base 3: mod_base = OTHER; note = 2'-O-methyladenosine
  modified_base 4: mod_base = um
  modified_base 5: mod_base = OTHER; note = 2'-fluorouridine
  modified_base 6: mod_base = OTHER; note = 2'-O-methyladenosine
  modified_base 7: mod_base = OTHER; note = 2'-fluoroadenosine
  modified_base 8: mod_base = gm
  modified_base 9: mod_base = OTHER; note = 2'-O-methyladenosine
  modified_base 10: mod_base = um
  modified_base 11: mod_base = um
  modified_base 12: mod_base = cm
  modified_base 13: mod_base = OTHER; note = 2'-O-methyladenosine
  modified_base 14: mod_base = OTHER; note = 2'-fluoroadenosine
  modified_base 15: mod_base = um
  modified_base 16: mod_base = OTHER; note = 2'-fluoroadenosine
  modified_base 17: mod_base = OTHER; note = 2'-O-methyladenosine
  modified_base 18: mod_base = cm
  modified_base 19: mod_base = um
  modified_base 20: mod_base = cm
  modified_base 21: mod_base = OTHER; note = 2'-O-methyluridine with a 3'-phosphorothioate linkage
  modified_base 22: mod_base = OTHER; note = 2'-O-methylguanosine with a 3'-phosphorothioate linkage
  modified_base 23: mod_base = cm
taattaagattcaataactctgc

SEQ ID NO: 2304 - RNA, 23 nt, synthetic construct
  source 1..23: mol_type = other RNA
  modified_base 1: mod_base = OTHER; note = 2'-O-methyluridine with a 3'-phosphorothioate linkage
  modified_base 2: mod_base = OTHER; note = 2'-fluoroadenosine with a 3'-phosphorothioate linkage
  modified_base 3: mod_base = OTHER; note = 2'-O-methyladenosine
  modified_base 4: mod_base = OTHER; note = 2'-O-methyladenosine
  modified_base 5: mod_base = OTHER; note = 2'-fluorouridine
  modified_base 6: mod_base = um
  modified_base 7: mod_base = OTHER; note = 2'-fluoroadenosine
  modified_base 8: mod_base = OTHER; note = 2'-O-methyladenosine
  modified_base 9: mod_base = gm
  modified_base 10: mod_base = OTHER; note = 2'-O-methyladenosine
  modified_base 11: mod_base = um
  modified_base 12: mod_base = um
  modified_base 13: mod_base = cm
  modified_base 14: mod_base = OTHER; note = 2'-fluoroadenosine
  modified_base 15: mod_base = OTHER; note = 2'-O-methyladenosine
  modified_base 16: mod_base = OTHER; note = 2'-fluorouridine
  modified_base 17: mod_base = OTHER; note = 2'-O-methyladenosine
  modified_base 18: mod_base = OTHER; note = 2'-O-methyladenosine
  modified_base 19: mod_base = cm
  modified_base 20: mod_base = um
  modified_base 21: mod_base = OTHER; note = 2'-O-methylcytidine with a 3'-phosphorothioate linkage
  modified_base 22: mod_base = OTHER; note = 2'-O-methyluridine with a 3'-phosphorothioate linkage
  modified_base 23: mod_base = gm
taaattaagattcaataactctg

SEQ ID NO: 2305 - RNA, 23 nt, synthetic construct
  source 1..23: mol_type = other RNA
  modified_base 1: mod_base = OTHER; note = 2'-O-methyluridine with a 3'-phosphorothioate linkage
  modified_base 2: mod_base = OTHER; note = 2'-fluorocytidine with a 3'-phosphorothioate linkage
  modified_base 3: mod_base = OTHER; note = 2'-O-methyladenosine
  modified_base 4: mod_base = OTHER; note = 2'-O-methyladenosine
  modified_base 5: mod_base = OTHER; note = 2'-fluoroadenosine
  modified_base 6: mod_base = OTHER; note = 2'-O-methyladenosine
  modified_base 7: mod_base = OTHER; note = 2'-fluorocytidine
  modified_base 8: mod_base = um
  modified_base 9: mod_base = um
  modified_base 10: mod_base = gm
  modified_base 11: mod_base = um
  modified_base 12: mod_base = OTHER; note = 2'-O-methyladenosine
  modified_base 13: mod_base = cm
  modified_base 14: mod_base = OTHER; note = 2'-fluoroadenosine
  modified_base 15: mod_base = um
  modified_base 16: mod_base = OTHER; note = 2'-fluorouridine
  modified_base 17: mod_base = OTHER; note = 2'-O-methyladenosine
  modified_base 18: mod_base = OTHER; note = 2'-O-methyladenosine
  modified_base 19: mod_base = OTHER; note = 2'-O-methyladenosine
  modified_base 20: mod_base = OTHER; note = 2'-O-methyladenosine
  modified_base 21: mod_base = OTHER; note = 2'-O-methyladenosine with a 3'-phosphorothioate linkage
  modified_base 22: mod_base = OTHER; note = 2'-O-methyladenosine with a 3'-phosphorothioate linkage
  modified_base 23: mod_base = OTHER; note = 2'-O-methyladenosine
tcaaaacttgtacattaaaaaaa

SEQ ID NO: 2306 - RNA, 23 nt, synthetic construct
  source 1..23: mol_type = other RNA
  modified_base 1: mod_base = OTHER; note = 2'-O-methyluridine with a 3'-phosphorothioate linkage
  modified_base 2: mod_base = OTHER; note = 2'-fluorouridine with a 3'-phosphorothioate linkage
  modified_base 3: mod_base = OTHER; note = 2'-O-methyladenosine
  modified_base 4: mod_base = cm
  modified_base 5: mod_base = OTHER; note = 2'-fluoroadenosine
  modified_base 6: mod_base = OTHER; note = 2'-O-methyladenosine
  modified_base 7: mod_base = OTHER; note = 2'-fluoroadenosine
  modified_base 8: mod_base = OTHER; note = 2'-O-methyladenosine
  modified_base 9: mod_base = cm
  modified_base 10: mod_base = um
  modified_base 11: mod_base = um
  modified_base 12: mod_base = gm
  modified_base 13: mod_base = um
  modified_base 14: mod_base = OTHER; note = 2'-fluoroadenosine
  modified_base 15: mod_base = cm
  modified_base 16: mod_base = OTHER; note = 2'-fluoroadenosine
  modified_base 17: mod_base = um
  modified_base 18: mod_base = um
  modified_base 19: mod_base = OTHER; note = 2'-O-methyladenosine
  modified_base 20: mod_base = OTHER; note = 2'-O-methyladenosine
  modified_base 21: mod_base = OTHER; note = 2'-O-methyladenosine with a 3'-phosphorothioate linkage
  modified_base 22: mod_base = OTHER; note = 2'-O-methyladenosine with a 3'-phosphorothioate linkage
  modified_base 23: mod_base = OTHER; note = 2'-O-methyladenosine
ttacaaaacttgtacattaaaaa

SEQ ID NO: 2307 - RNA, 23 nt, synthetic construct
  source 1..23: mol_type = other RNA
  modified_base 1: mod_base = OTHER; note = 2'-O-methyluridine with a 3'-phosphorothioate linkage
  modified_base 2: mod_base = OTHER; note = 2'-fluorouridine with a 3'-phosphorothioate linkage
  modified_base 3: mod_base = OTHER; note = 2'-O-methyladenosine
  modified_base 4: mod_base = OTHER; note = 2'-O-methyladenosine
  modified_base 5: mod_base = OTHER; note = 2'-fluoroguanosine
  modified_base 6: mod_base = gm
  modified_base 7: mod_base = OTHER; note = 2'-fluoroadenosine
  modified_base 8: mod_base = gm
  modified_base 9: mod_base = um
  modified_base 10: mod_base = um
  modified_base 11: mod_base = cm
  modified_base 12: mod_base = um
  modified_base 13: mod_base = um
  modified_base 14: mod_base = OTHER; note = 2'-fluorouridine
  modified_base 15: mod_base = OTHER; note = 2'-O-methyladenosine
  modified_base 16: mod_base = OTHER; note = 2'-fluorouridine
  modified_base 17: mod_base = um
  modified_base 18: mod_base = OTHER; note = 2'-O-methyladenosine
  modified_base 19: mod_base = um
  modified_base 20: mod_base = um
  modified_base 21: mod_base = OTHER; note = 2'-O-methyluridine with a 3'-phosphorothioate linkage
  modified_base 22: mod_base = OTHER; note = 2'-O-methyladenosine with a 3'-phosphorothioate linkage
  modified_base 23: mod_base = um
ttaaggagttctttattatttat

SEQ ID NO: 2308 - RNA, 23 nt, synthetic construct
  source 1..23: mol_type = other RNA
  modified_base 1: mod_base = OTHER; note = 2'-O-methyluridine with a 3'-phosphorothioate linkage
  modified_base 2: mod_base = OTHER; note = 2'-fluoroadenosine with a 3'-phosphorothioate linkage
  modified_base 3: mod_base = um
  modified_base 4: mod_base = OTHER; note = 2'-O-methyladenosine
  modified_base 5: mod_base = OTHER; note = 2'-fluoroadenosine
  modified_base 6: mod_base = gm
  modified_base 7: mod_base = OTHER; note = 2'-fluoroguanosine
  modified_base 8: mod_base = OTHER; note = 2'-O-methyladenosine
  modified_base 9: mod_base = gm
  modified_base 10: mod_base = um
  modified_base 11: mod_base = um
  modified_base 12: mod_base = cm
  modified_base 13: mod_base = um
  modified_base 14: mod_base = OTHER; note = 2'-fluorouridine
  modified_base 15: mod_base = um
  modified_base 16: mod_base = OTHER; note = 2'-fluoroadenosine
  modified_base 17: mod_base = um
  modified_base 18: mod_base = um
  modified_base 19: mod_base = OTHER; note = 2'-O-methyladenosine
  modified_base 20: mod_base = um
  modified_base 21: mod_base = OTHER; note = 2'-O-methyluridine with a 3'-phosphorothioate linkage
  modified_base 22: mod_base = OTHER; note = 2'-O-methyluridine with a 3'-phosphorothioate linkage
  modified_base 23: mod_base = OTHER; note = 2'-O-methyladenosine
tataaggagttctttattattta

SEQ ID NO: 2309 - RNA, 23 nt, synthetic construct
  source 1..23: mol_type = other RNA
  modified_base 1: mod_base = OTHER; note = 2'-O-methyluridine with a 3'-phosphorothioate linkage
  modified_base 2: mod_base = OTHER; note = 2'-fluoroadenosine with a 3'-phosphorothioate linkage
  modified_base 3: mod_base = OTHER; note = 2'-O-methyladenosine
  modified_base 4: mod_base = um
  modified_base 5: mod_base = OTHER; note = 2'-fluoroadenosine
  modified_base 6: mod_base = OTHER; note = 2'-O-methyladenosine
  modified_base 7: mod_base = OTHER; note = 2'-fluoroguanosine
  modified_base 8: mod_base = gm
  modified_base 9: mod_base = OTHER; note = 2'-O-methyladenosine
  modified_base 10: mod_base = gm
  modified_base 11: mod_base = um
  modified_base 12: mod_base = um
  modified_base 13: mod_base = cm
  modified_base 14: mod_base = OTHER; note = 2'-fluorouridine
  modified_base 15: mod_base = um
  modified_base 16: mod_base = OTHER; note = 2'-fluorouridine
  modified_base 17: mod_base = OTHER; note = 2'-O-methyladenosine
  modified_base 18: mod_base = um
  modified_base 19: mod_base = um
  modified_base 20: mod_base = OTHER; note = 2'-O-methyladenosine
  modified_base 21: mod_base = OTHER; note = 2'-O-methyluridine with a 3'-phosphorothioate linkage
  modified_base 22: mod_base = OTHER; note = 2'-O-methyluridine with a 3'-phosphorothioate linkage
  modified_base 23: mod_base = um
taataaggagttctttattattt

SEQ ID NO: 2310 - RNA, 23 nt, synthetic construct
  source 1..23: mol_type = other RNA
  modified_base 1: mod_base = OTHER; note = 2'-O-methyluridine with a 3'-phosphorothioate linkage
  modified_base 2: mod_base = OTHER; note = 2'-fluoroadenosine with a 3'-phosphorothioate linkage
  modified_base 3: mod_base = OTHER; note = 2'-O-methyladenosine
  modified_base 4: mod_base = OTHER; note = 2'-O-methyladenosine
  modified_base 5: mod_base = OTHER; note = 2'-fluorouridine
  modified_base 6: mod_base = OTHER; note = 2'-O-methyladenosine
  modified_base 7: mod_base = OTHER; note = 2'-fluoroadenosine
  modified_base 8: mod_base = gm
  modified_base 9: mod_base = gm
  modified_base 10: mod_base = OTHER; note = 2'-O-methyladenosine
  modified_base 11: mod_base = gm
  modified_base 12: mod_base = um
  modified_base 13: mod_base = um
  modified_base 14: mod_base = OTHER; note = 2'-fluorocytidine
  modified_base 15: mod_base = um
  modified_base 16: mod_base = OTHER; note = 2'-fluorouridine
  modified_base 17: mod_base = um
  modified_base 18: mod_base = OTHER; note = 2'-O-methyladenosine
  modified_base 19: mod_base = um
  modified_base 20: mod_base = um
  modified_base 21: mod_base = OTHER; note = 2'-O-methyladenosine with a 3'-phosphorothioate linkage
  modified_base 22: mod_base = OTHER; note = 2'-O-methyluridine with a 3'-phosphorothioate linkage
  modified_base 23: mod_base = um
taaataaggagttctttattatt

SEQ ID NO: 2311 - RNA, 23 nt, synthetic construct
  source 1..23: mol_type = other RNA
  modified_base 1: mod_base = OTHER; note = 2'-O-methyluridine with a 3'-phosphorothioate linkage
  modified_base 2: mod_base = OTHER; note = 2'-fluoroadenosine with a 3'-phosphorothioate linkage
  modified_base 3: mod_base = OTHER; note = 2'-O-methyladenosine
  modified_base 4: mod_base = OTHER; note = 2'-O-methyladenosine
  modified_base 5: mod_base = OTHER; note = 2'-fluoroadenosine
  modified_base 6: mod_base = um
  modified_base 7: mod_base = OTHER; note = 2'-fluoroadenosine
  modified_base 8: mod_base = OTHER; note = 2'-O-methyladenosine
  modified_base 9: mod_base = gm
  modified_base 10: mod_base = gm
  modified_base 11: mod_base = OTHER; note = 2'-O-methyladenosine
  modified_base 12: mod_base = gm
  modified_base 13: mod_base = um
  modified_base 14: mod_base = OTHER; note = 2'-fluorouridine
  modified_base 15: mod_base = cm
  modified_base 16: mod_base = OTHER; note = 2'-fluorouridine
  modified_base 17: mod_base = um
  modified_base 18: mod_base = um
  modified_base 19: mod_base = OTHER; note = 2'-O-methyladenosine
  modified_base 20: mod_base = um
  modified_base 21: mod_base = OTHER; note = 2'-O-methyluridine with a 3'-phosphorothioate linkage
  modified_base 22: mod_base = OTHER; note = 2'-O-methyladenosine with a 3'-phosphorothioate linkage
  modified_base 23: mod_base = um
taaaataaggagttctttattat

SEQ ID NO: 2312 - RNA, 23 nt, synthetic construct
  source 1..23: mol_type = other RNA
  modified_base 1: mod_base = OTHER; note = 2'-O-methyluridine with a 3'-phosphorothioate linkage
  modified_base 2: mod_base = OTHER; note = 2'-fluoroadenosine with a 3'-phosphorothioate linkage
  modified_base 3: mod_base = cm
  modified_base 4: mod_base = OTHER; note = 2'-O-methyladenosine
  modified_base 5: mod_base = OTHER; note = 2'-fluorocytidine
  modified_base 6: mod_base = um
  modified_base 7: mod_base = OTHER; note = 2'-fluorouridine
  modified_base 8: mod_base = gm
  modified_base 9: mod_base = OTHER; note = 2'-O-methyladenosine
  modified_base 10: mod_base = OTHER; note = 2'-O-methyladenosine
  modified_base 11: mod_base = gm
  modified_base 12: mod_base = cm
  modified_base 13: mod_base = OTHER; note = 2'-O-methyladenosine
  modified_base 14: mod_base = OTHER; note = 2'-fluorouridine
  modified_base 15: mod_base = um
  modified_base 16: mod_base = OTHER; note = 2'-fluoroadenosine
  modified_base 17: mod_base = gm
  modified_base 18: mod_base = OTHER; note = 2'-O-methyladenosine
  modified_base 19: mod_base = um
  modified_base 20: mod_base = gm
  modified_base 21: mod_base = OTHER; note = 2'-O-methyluridine with a 3'-phosphorothioate linkage
  modified_base 22: mod_base = OTHER; note = 2'-O-methyladenosine with a 3'-phosphorothioate linkage
  modified_base 23: mod_base = OTHER; note = 2'-O-methyladenosine
tacacttgaagcattagatgtaa

SEQ ID NO: 2313 - RNA, 23 nt, synthetic construct
  source 1..23: mol_type = other RNA
  modified_base 1: mod_base = OTHER; note = 2'-O-methyluridine with a 3'-phosphorothioate linkage
  modified_base 2: mod_base = OTHER; note = 2'-fluoroadenosine with a 3'-phosphorothioate linkage
  modified_base 3: mod_base = cm
  modified_base 4: mod_base = um
  modified_base 5: mod_base = OTHER; note = 2'-fluorouridine
  modified_base 6: mod_base = cm
  modified_base 7: mod_base = OTHER; note = 2'-fluorocytidine
  modified_base 8: mod_base = OTHER; note = 2'-O-methyladenosine
  modified_base 9: mod_base = um
  modified_base 10: mod_base = gm
  modified_base 11: mod_base = OTHER; note = 2'-O-methyladenosine
  modified_base 12: mod_base = OTHER; note = 2'-O-methyladenosine
  modified_base 13: mod_base = OTHER; note = 2'-O-methyladenosine
  modified_base 14: mod_base = OTHER; note = 2'-fluoroadenosine
  modified_base 15: mod_base = gm
  modified_base 16: mod_base = OTHER; note = 2'-fluorocytidine
  modified_base 17: mod_base = um
  modified_base 18: mod_base = cm
  modified_base 19: mod_base = OTHER; note = 2'-O-methyladenosine
  modified_base 20: mod_base = gm
  modified_base 21: mod_base = OTHER; note = 2'-O-methyladenosine with a 3'-phosphorothioate linkage
  modified_base 22: mod_base = OTHER; note = 2'-O-methyladenosine with a 3'-phosphorothioate linkage
  modified_base 23: mod_base = OTHER; note = 2'-O-methyladenosine
tacttccatgaaaagctcagaaa

SEQ ID NO: 2314 - RNA, 23 nt, synthetic construct
  source 1..23: mol_type = other RNA
  modified_base 1: mod_base = OTHER; note = 2'-O-methyluridine with a 3'-phosphorothioate linkage
  modified_base 2: mod_base = OTHER; note = 2'-fluorocytidine with a 3'-phosphorothioate linkage
  modified_base 3: mod_base = cm
  modified_base 4: mod_base = OTHER; note = 2'-O-methyladenosine
  modified_base 5: mod_base = OTHER; note = 2'-fluorocytidine
  modified_base 6: mod_base = um
  modified_base 7: mod_base = OTHER; note = 2'-fluorouridine
  modified_base 8: mod_base = cm
  modified_base 9: mod_base = cm
  modified_base 10: mod_base = OTHER; note = 2'-O-methyladenosine
  modified_base 11: mod_base = um
  modified_base 12: mod_base = gm
  modified_base 13: mod_base = OTHER; note = 2'-O-methyladenosine
  modified_base 14: mod_base = OTHER; note = 2'-fluoroadenosine
  modified_base 15: mod_base = OTHER; note = 2'-O-methyladenosine
  modified_base 16: mod_base = OTHER; note = 2'-fluoroadenosine
  modified_base 17: mod_base = gm
  modified_base 18: mod_base = cm
  modified_base 19: mod_base = um
  modified_base 20: mod_base = cm
  modified_base 21: mod_base = OTHER; note = 2'-O-methyladenosine with a 3'-phosphorothioate linkage
  modified_base 22: mod_base = OTHER; note = 2'-O-methylguanosine with a 3'-phosphorothioate linkage
  modified_base 23: mod_base = OTHER; note = 2'-O-methyladenosine
tccacttccatgaaaagctcaga

SEQ ID NO: 2315 - RNA, 23 nt, synthetic construct
  source 1..23: mol_type = other RNA
  modified_base 1: mod_base = OTHER; note = 2'-O-methyluridine with a 3'-phosphorothioate linkage
  modified_base 2: mod_base = OTHER; note = 2'-fluorouridine with a 3'-phosphorothioate linkage
  modified_base 3: mod_base = gm
  modified_base 4: mod_base = cm
  modified_base 5: mod_base = OTHER; note = 2'-fluorocytidine
  modified_base 6: mod_base = OTHER; note = 2'-O-methyladenosine
  modified_base 7: mod_base = OTHER; note = 2'-fluorocytidine
  modified_base 8: mod_base = um
  modified_base 9: mod_base = um
  modified_base 10: mod_base = cm
  modified_base 11: mod_base = cm
  modified_base 12: mod_base = OTHER; note = 2'-O-methyladenosine
  modified_base 13: mod_base = um
  modified_base 14: mod_base = OTHER; note = 2'-fluoroguanosine
  modified_base 15: mod_base = OTHER; note = 2'-O-methyladenosine
  modified_base 16: mod_base = OTHER; note = 2'-fluoroadenosine
  modified_base 17: mod_base = OTHER; note = 2'-O-methyladenosine
  modified_base 18: mod_base = OTHER; note = 2'-O-methyladenosine
  modified_base 19: mod_base = gm
  modified_base 20: mod_base = cm
  modified_base 21: mod_base = OTHER; note = 2'-O-methyluridine with a 3'-phosphorothioate linkage
  modified_base 22: mod_base = OTHER; note = 2'-O-methylcytidine with a 3'-phosphorothioate linkage
  modified_base 23: mod_base = OTHER; note = 2'-O-methyladenosine
ttgccacttccatgaaaagctca

SEQ ID NO: 2316 - RNA, 23 nt, synthetic construct
  source 1..23: mol_type = other RNA
  modified_base 1: mod_base = OTHER; note = 2'-O-methyluridine with a 3'-phosphorothioate linkage
  modified_base 2: mod_base = OTHER; note = 2'-fluorouridine with a 3'-phosphorothioate linkage
  modified_base 3: mod_base = um
  modified_base 4: mod_base = cm
  modified_base 5: mod_base = OTHER; note = 2'-fluoroadenosine
  modified_base 6: mod_base = cm
  modified_base 7: mod_base = OTHER; note = 2'-fluorouridine
  modified_base 8: mod_base = gm
  modified_base 9: mod_base = cm
  modified_base 10: mod_base = cm
  modified_base 11: mod_base = OTHER; note = 2'-O-methyladenosine
  modified_base 12: mod_base = cm
  modified_base 13: mod_base = um
  modified_base 14: mod_base = OTHER; note = 2'-fluorouridine
  modified_base 15: mod_base = cm
  modified_base 16: mod_base = OTHER; note = 2'-fluorocytidine
  modified_base 17: mod_base = OTHER; note = 2'-O-methyladenosine
  modified_base 18: mod_base = um
  modified_base 19: mod_base = gm
  modified_base 20: mod_base = OTHER; note = 2'-O-methyladenosine
  modified_base 21: mod_base = OTHER; note = 2'-O-methyladenosine with a 3'-phosphorothioate linkage
  modified_base 22: mod_base = OTHER; note = 2'-O-methyladenosine with a 3'-phosphorothioate linkage
  modified_base 23: mod_base = OTHER; note = 2'-O-methyladenosine
tttcactgccacttccatgaaaa

SEQ ID NO: 2317 - RNA, 23 nt, synthetic construct
  source 1..23: mol_type = other RNA
  modified_base 1: mod_base = OTHER; note = 2'-O-methyluridine with a 3'-phosphorothioate linkage
  modified_base 2: mod_base = OTHER; note = 2'-fluoroguanosine with a 3'-phosphorothioate linkage
  modified_base 3: mod_base = um
  modified_base 4: mod_base = OTHER; note = 2'-O-methyladenosine
  modified_base 5: mod_base = OTHER; note = 2'-fluoroadenosine
  modified_base 6: mod_base = um
  modified_base 7: mod_base = OTHER; note = 2'-fluorouridine
  modified_base 8: mod_base = gm
  modified_base 9: mod_base = um
  modified_base 10: mod_base = OTHER; note = 2'-O-methyladenosine
  modified_base 11: mod_base = cm
  modified_base 12: mod_base = OTHER; note = 2'-O-methyladenosine
  modified_base 13: mod_base = OTHER; note = 2'-O-methyladenosine
  modified_base 14: mod_base = OTHER; note = 2'-fluoroadenosine
  modified_base 15: mod_base = OTHER; note = 2'-O-methyladenosine
  modified_base 16: mod_base = OTHER; note = 2'-fluorocytidine
  modified_base 17: mod_base = OTHER; note = 2'-O-methyladenosine
  modified_base 18: mod_base = um
  modified_base 19: mod_base = um
  modified_base 20: mod_base = OTHER; note = 2'-O-methyladenosine
  modified_base 21: mod_base = OTHER; note = 2'-O-methyladenosine with a 3'-phosphorothioate linkage
  modified_base 22: mod_base = OTHER; note = 2'-O-methyluridine with a 3'-phosphorothioate linkage
  modified_base 23: mod_base = cm
tgtaattgtacaaaacattaatc
